United States Patent Application Publication US 2011/0189663 A1 - sequence listing, part 2

SEQ ID NO: 2843 - DNA, 661 bp, Homo sapiens
  misc_feature [331]..[331]: Chromosome 6, SNP identification no. = rs544734
  misc_feature [331]..[331]: allele = a, in linkage disequilibrium with rs507500, respectively
  misc_feature [331]..[331]: n is a, t, c or g
atggcagcatatcgctcatacatggcttcgtgccctccccatggtaatgagtgtgttgttactatattcattcacaggagaactgattgttcagagactgacacctcttccctctatcttgctccctctcttgccatgtgacttgcctgctcccctttcaccttccaccatgagtaaaagcttcctgagacttcatcagatgcttagcagatgctggcaccatgcagaaccatgagccaaataaatctcttactaaattactgagcctcccgtattcctttatagcaatacaaaacaggttaacacattatcctactgtacttgtatggcnttatattaagaaggtatttatgaatggatgtttctcttttaaaagaataaaacatcaaggctgagcatggtggctcacagctataatccctgcctttgggagcccgaggcaagcaaaaggcttgagcccaggaatttgacaccagcctgctcaacatggtgaaaccctgtctctacaaaaaatacataaaggagctgggcatgatggttcatgcctgtagtacttggtagtactacaagtagctacttgggaggctgaggtgggaggatcacttgagcccagaaggtgaagcttgcagtgagcggagatcatgccattcactccagccag

SEQ ID NO: 2844 - DNA, 661 bp, Homo sapiens
  misc_feature [331]..[331]: Chromosome 6, SNP identification no. = rs554594
  misc_feature [331]..[331]: allele = a, in linkage disequilibrium with rs507500, respectively
  misc_feature [331]..[331]: n is a, t, c or g
cctacctacctacctaactacctacttacctatctatctaatatggttgggatatttgtctcctcaaaatctcatgatgaaatgtgatctccaatgttggaggtggaacttagtgggaggtgtttgggtcatggcagcatatcgctcatacatggcttcgtgccctccccatggtaatgagtgtgttgttactatattcattcacaggagaactgattgttcagagactgacacctcttccctctatcttgctccctctcttgccatgtgacttgcctgctcccctttcaccttccaccatgagtaaaagcttcctgagacttcatcagangcttagcagatgctggcaccatgcagaaccatgagccaaataaatctcttactaaattactgagcctcccgtattcctttatagcaatacaaaacaggttaacacattatcctactgtacttgtatggctttatattaagaaggtatttatgaatggatgtttctcttttaaaagaataaaacatcaaggctgagcatggtggctcacagctataatccctgcctttgggagcccgaggcaagcaaaaggcttgagcccaggaatttgacaccagcctgctcaacatggtgaaaccctgtctctacaaaaaatacataaaggagctgggc

SEQ ID NO: 2845 - DNA, 661 bp, Homo sapiens
  misc_feature [331]..[331]: Chromosome 6, SNP identification no. = rs511002
  misc_feature [331]..[331]: allele = c, c, in linkage disequilibrium with rs507500, rs932614, respectively
  misc_feature [331]..[331]: n is a, t, c or g
gctaagtttaaatctcccacattatttgaatgatgagttcaagtatagaagctgctctggcttggaagaatctttcatgaactgcagacttgtgggtgcatcctagcacagggtagcattgcatagaaagggcctgcaaccttctggctttgcatccattgaagtgtgaatttctaaaaatcatggcaagcaggtccctctggtgacctagctcccagtaaagaattgtcttagtagaaaagacactaaaagtaaatgggaaattgtgaacacaatatttctttccccttctccatgatttcctaagcaaatgaacaacttgcttggtgangcctttcctgtctgctcaaacttcttctctatttttctttataatatttatacttatttagtttattatctatatccacttctctagaacataagttccatgaagtcatcgatttctttcactgcttagccccatgcccagaaaagtttctggcacttagtaggtgctcattaaatacttgttttaaaaaaaaatgagtaaacttaagttattgctttcccacataacttataaaggaataatcagtctattttaagtagttttaggattgtgtccccaaaaatgaaaataaaatactaagagagatgaaccaaggtggattatttatct

SEQ ID NO: 2846 - DNA, 661 bp, Homo sapiens
  misc_feature [331]..[331]: Chromosome 6, SNP identification no. = rs507500
  misc_feature [331]..[331]: allele = t, c
  misc_feature [331]..[331]: n is a, t, c or g
tgtcagtgttcaaagggaatgcttccagtttttgcccattcagtatgatattggctgtgggtttgtcataaatagctgttattattttgagatatgtcccatcggggaaaacacattctttatcagcatttcatagtgtgattttgcacttctattgtgatatctctgtaggtgttttgacaatgttgcctttttagcacaaacaaacatgtatgcaagatagaaagagaagcaaaagtctcatgcagtgtctccaacttcagacatgtttaagatcaagcctcaggcaatccaacttttcttttgacaagccaaatgtcctgtgtgaaangatactgaactgctcaaggagtttggctaagtttaaatctcccacattatttgaatgatgagttcaagtatagaagctgctctggcttggaagaatctttcatgaactgcagacttgtgggtgcatcctagcacagggtagcattgcatagaaagggcctgcaaccttctggctttgcatccattgaagtgtgaatttctaaaaatcatggcaagcaggtccctctggtgacctagctcccagtaaagaattgtcttagtagaaaagacactaaaagtaaatgggaaattgtgaacacaatatttctttccccttctccatgatttccta

SEQ ID NO: 2847 - DNA, 661 bp, Homo sapiens
  misc_feature [331]..[331]: Chromosome 6, SNP identification no. = rs532219
  misc_feature [331]..[331]: allele = a, a, in linkage disequilibrium with rs507500, rs932614, respectively
  misc_feature [331]..[331]: n is a, t, c or g
gaaaactctgtgagacagctgaaaaagtgagttcccaaagcatgagagggaaaaacctgcctccaaacacacatctccagtggggaacctgaaaattcacataataggggaaggatataatagacttagggagccaagcaaaatattaaagtagaagaagcaatagaaagagccttgtaggcactctcacttcccagcttgagcccagggaagccacccctgactttatctcacagggctccttaaggaaggcagccagtggaactagggaggggtcacagggtgaaagaagcttccaactgaactttgtaataatttcaaccaagctcanattttcttgagccgaatccaagggttaaacaggaaatgctgcagatacaagcactggagctgcagccaacagtgtgtgcagacagggagaggcaagacctgaaagcgatgatagctttcttagctggaaggcttcttgcctggggcaaggtctgagccctgtgcatgggctacctgaaaataaattgttggtgaggcatgacaggagcaagaccagccttgatggctgtgtgggagctgggtgagacctgtcactgttggcttcccccaacttccctggtgacctgtatgatgcagcagaggcagccataatccctttagaacataactc

SEQ ID NO: 2848 - DNA, 661 bp, Homo sapiens
  misc_feature [331]..[331]: Chromosome 6, SNP identification no. = rs577767
  misc_feature [331]..[331]: allele = c, in linkage disequilibrium with rs507500, respectively
  misc_feature [331]..[331]: n is a, t, c or g
tctgctatcagctgtattttttccatgctcttttctacttttgtggagatcaactcctttgttattctcccaaaatgtttaaatagactggagctgtagtttgaaaaacaatgagaaatgctagagccttataaaacgttaaacagctacaagaacatgtctaattctttgaatactatttcattttagaatgtaacatgaagaggagaagagcttgaactgggagttaagaccttatttttagccctgattctgccacaaacttattatataacctttgggcacttctcagagcctgtatttcctcatgtgtgaaatgaaggcattaggntagaatgatcttccctccctgcctgaacatttcataatgctacatttctacatttctcaagtttaaccttcattctacactgaatatacctaaaattttatgtagatcctctcttgaaaaattatttcgctgccactaacactgttttgcaaattgtggtcttcaaacttccttttaacagaaccacctggaatttatattaaaaatgcagattctaggacctgcccacgcataaagatccaaaatctttatgaagagagggaggattcaagaatatatgtatatatgtgtgtgtgtgtatatatatacacatatatgtatatatataat

SEQ ID NO: 2849 - DNA, 661 bp, Homo sapiens
  misc_feature [331]..[331]: Chromosome 6, SNP identification no. = rs526833
  misc_feature [331]..[331]: allele = t, in linkage disequilibrium with rs507500, respectively
  misc_feature [331]..[331]: n is a, t, c or g
aaaggagttgatctccacaaaagtagaaaagagcatggaaaaaatacagctgatagcagacaaggttttctctgtgaaaagattttaaacaattattttatgttttaaatacctgtaattaaacccctttctgtaaccactccagtctccttttggcttttccaaaataaaatcttttttctgcacaggaaggtcagattgtgtcttgttgattcacacctgatgagcaaagtgcatgtatcatgaatgctaacacccattgttattattttcaagaaccaggtattaagtgcctacgatgccaacatggaaaaacaaccctttgacaganttttcttcatttttgttaaactcttctgcatttctataggataaaaatctatttcaaagctgtgctgctggcagttttacatgaaatgtattttaaacatgacagttgttttcatgtggaaaaatacaaacatggctaacatataaaatgattatacaaattgcgcaggactgattgcttagaatattcactattccaaacgttctgtttcttaaagggaaatattcatcagaaaataaattgcatatttagaacttgaaatccgactttttttataaaaagaaataagtttctacttcttcacaaagaagacagtgaacatattggagt

SEQ ID NO: 2850 - DNA, 661 bp, Homo sapiens
  misc_feature [331]..[331]: Chromosome 6, SNP identification no. = rs7756828
  misc_feature [331]..[331]: allele = a, a, in linkage disequilibrium with rs507500, rs932614, respectively
  misc_feature [331]..[331]: n is a, t, c or g
acttttgcaagcacagcattacataaagcatttcagtaatgttattcagtttgcttccccagggtcttgaaaccagctcataggtgctgacttgttccaacctcaaaatcttcattctaggcagaaattaaaccaagtcaaaggagacagacatactcagagaaggggaaaatatctagagataaacgattatgatactctctctgatagcccatcaattccttatatacaaatcttaggtgattctgatacccaactaggtttggaaccaaagttgtagatggtctaatacagtaattctcaatctctgatgcatattaaaatcaagagnagaatttatttaaaaaatagaagcttcacacacccagatattttattgacttgagcatcagaatttgttttaaaagtctccagttattgtattaataatgtgcagccaggatcgagaacaactgatctaaggtattaaataaggaagagttattcccttctggaggagaggggctcagtttccttaattctttattcattgaggaaactgagctcctttcctccagaagggaataattaaatttctgtaagcatgcataaatatgaatagtcaattcaattcaacaaatctttattgaggacctacatgtttgtggtattcatgcctatt

SEQ ID NO: 2851 - DNA, 661 bp, Homo sapiens
  misc_feature [331]..[331]: Chromosome 6, SNP identification no. = rs508106
  misc_feature [331]..[331]: allele = t, t, in linkage disequilibrium with rs507500, rs932614, respectively
  misc_feature [331]..[331]: n is a, t, c or g
ctcaagtaatttttcaggacttttgcaatagtgagtacaattctgtaatttgaaacaaacacaagttaaaagaaatccaagattactcttattttttgcaatattcctttcaaaacacttttatagttttagtgtccatcatgagcagtcttgacagttttttggtacacagggcaacttttgaagcatgaggtagaattgcagtatcatgtcatagtattatcttcagttctacagattcagaagtcaacattttctgattttaaaaccagattatacactatattcctgataaagacctcaagctatctctcagctcttggaagtaccnaaacaccttgcttttcttcctgtggcatttaccttattctgccttgaataatttcttttttttttttttttgagacagagtctcactctattgcttaggctggagggcagtggcacaatttcagctcactgcaacctccacctgctgggttcaagtgactctcatacctcagcctcccaagtagctgggaccacaggtgcatgccaccaggcccggctaatttttgtatttttggtggagacgagatttcatcatatgtgccagactggtcttgaactcctgacctcaagtgatccgcctgcctcagtctcccaaagtgctgggattaca

SEQ ID NO: 2852 - DNA, 661 bp, Homo sapiens
  misc_feature [331]..[331]: Chromosome 6, SNP identification no. = rs555844
  misc_feature [331]..[331]: allele = t, in linkage disequilibrium with rs507500, respectively
  misc_feature [331]..[331]: n is a, t, c or g
tggacattgcctattgatttctactctaaaggattggatgttgcctattgcttttctactctaaaggatgaagattttgctcagctctacagtctgcctcttcctgcaataaatgttgtagagactggggatatacccgtgaacagaacaaagtccccagtacttatgaacttacattgcggtttgagaaggtaaaataactaaataacataaataactaaataactgaattatataattccagaaagtgaaccataatatgaaaaaaaggaaagaaaaaaagacaatgggaaaggacacaagtctctttcctccctctacccaatatagntgtaataaaacgtttgatgttttcaccgatatgactagataactacttgacactgaagcatatatcgtactataattaccattcatttattgtacaactatttcttttctctgagactgtaattttatttgcatttgatttgttttccatgtactgagaactaattcattcctatcattctgccaaaactataaaacttctcttgatgtggtcaaacacaacagttaattctgttttttttttctccttctccttttcttcctctctcatcattcctcccagatacctctgtcctcctgctccagccttttccagtaactttccaggcct

SEQ ID NO: 2853 - DNA, 661 bp, Homo sapiens
  misc_feature [331]..[331]: Chromosome 6, SNP identification no. = rs1923137
  misc_feature [331]..[331]: allele = a, a, in linkage disequilibrium with rs507500, rs932614, respectively
  misc_feature [331]..[331]: n is a, t, c or g
ccagtgcaagtggagggcctatgcttcattcgcttcatggtaaaactgactcttcatcctgattcctaccagggtcccagaggagtggtatctgactttgttggctgaagaggagatctgggagttctatactgctgcttacagtcttctcatcaattctcttctttttagtgctatcccataccctggttcttcacgaggaaccagtgtcttcaagtcccaaagctttatggcccttaaagtttaatgggagtgcttctgttggggcatctgacactgcaggcagttaggcttcagtgatctctgctgagctgtcttttatcactcattnattatttcccaccatctaaaatgtgtggctatctcttagctgctgttattccccaccctgttctctttgttctcacagtggttttattcctttgctgccatttaagtgggggttttaggagagcacagaactaaacaaacaggttcagtttgccatgtttaatcagaagtctcattctatctttgaatatttttatgtttgtcattaaatccaatattttattgccacttagatgaatttattatacaactcagcatttgttgtactacatatttaagaaatatatactgtacttcaatattctcataaactgttgttttttgttctttt

SEQ ID NO: 2854 - DNA, 661 bp, Homo sapiens
  misc_feature [331]..[331]: Chromosome 6, SNP identification no. = rs1923138
  misc_feature [331]..[331]: allele = c, in linkage disequilibrium with rs507500, respectively
  misc_feature [331]..[331]: n is a, t, c or g
gagggcctatgcttcattcgcttcatggtaaaactgactcttcatcctgattcctaccagggtcccagaggagtggtatctgactttgttggctgaagaggagatctgggagttctatactgctgcttacagtcttctcatcaattctcttctttttagtgctatcccataccctggttcttcacgaggaaccagtgtcttcaagtcccaaagctttatggcccttaaagtttaatgggagtgcttctgttggggcatctgacactgcaggcagttaggcttcagtgatctctgctgagctgtcttttatcactcattaattatttcccancatctaaaatgtgtggctatctcttagctgctgttattccccaccctgttctctttgttctcacagtggttttattcctttgctgccatttaagtgggggttttaggagagcacagaactaaacaaacaggttcagtttgccatgtttaatcagaagtctcattctatctttgaatatttttatgtttgtcattaaatccaatattttattgccacttagatgaatttattatacaactcagcatttgttgtactacatatttaagaaatatatactgtacttcaatattctcataaactgttgttttttgttcttttgtttttaatatc

SEQ ID NO: 2855 - DNA, 661 bp, Homo sapiens
  misc_feature [331]..[331]: Chromosome 6, SNP identification no. = rs723142
  misc_feature [331]..[331]: allele = t, t, in linkage disequilibrium with rs507500, rs932614, respectively
  misc_feature [331]..[331]: n is a, t, c or g
taaaggagcttgtaaaaaaaattccctatgttttgtggaaaaaaattttgcctagtttattcttctagataatgtttgataatgtttgttaaatatataaatgtgccaagaaatagtcctatttcatccactatgcttcttggaaccgcagatttgcaagaaaacttcaataagtacagtgtaaaaaagagatatgtagtcaagtaagttttctaaactctgagttcaatgaaatcaaacagttttttttacatcaagacttcttagagccttaactacaatattcacagtgagtctttaaagagggaataattattagtattttccaaanttattgtactaccagtcctatttaagcagcacactattaactccttacaaaacaaattacatcaagatatagtttgaaaatttttttaatcaacagcatgttttctaattctgttgaaagacctaattttcatcctatgaaagacctaattttaatcctgaagggtaattgtagttcttccattatcaattccattctagatcctgatctcttatgcttactctcacttgaaacccttaggaatatcagtttgaccatcttccttgaggatgtaaataatacaggaggaaatgaaaagctcatgtcagagaaattttaatattagagtta

SEQ ID NO: 2856 - DNA, 661 bp, Homo sapiens
  misc_feature [331]..[331]: Chromosome 6, SNP identification no. = rs2180742
  misc_feature [331]..[331]: allele = c, c, in linkage disequilibrium with rs507500, rs932614, respectively
  misc_feature [331]..[331]: n is a, t, c or g
tcaatgaaatcaaacagttttttttacatcaagacttcttagagccttaactacaatattcacagtgagtctttaaagagggaataattattagtattttccaaatttattgtactaccagtcctatttaagcagcacactattaactccttacaaaacaaattacatcaagatatagtttgaaaatttttttaatcaacagcatgttttctaattctgttgaaagacctaattttcatcctatgaaagacctaattttaatcctgaagggtaattgtagttcttccattatcaattccattctagatcctgatctcttatgcttactctnacttgaaacccttaggaatatcagtttgaccatcttccttgaggatgtaaataatacaggaggaaatgaaaagctcatgtcagagaaattttaatattagagttattggggagaagcagggatgaataaaggataacagtgggatggtgaggcaaaagctaggtcaccccaaatagtcctgagctgaagagcttgcttataccttaggatcagggttaattttaaggcagaatcagatagataaagaggtaacaccaaagatagtcattaagtctctctcctccctctgttctctctctaatctttagtgtttgccaaactttctctctg

SEQ ID NO: 2857 - DNA, 661 bp, Homo sapiens
  misc_feature [331]..[331]: Chromosome 6, SNP identification no. = rs1547614
  misc_feature [331]..[331]: allele = a, in linkage disequilibrium with rs507500, respectively
  misc_feature [331]..[331]: n is a, t, c or g
gagggaataattattagtattttccaaatttattgtactaccagtcctatttaagcagcacactattaactccttacaaaacaaattacatcaagatatagtttgaaaatttttttaatcaacagcatgttttctaattctgttgaaagacctaattttcatcctatgaaagacctaattttaatcctgaagggtaattgtagttcttccattatcaattccattctagatcctgatctcttatgcttactctcacttgaaacccttaggaatatcagtttgaccatcttccttgaggatgtaaataatacaggaggaaatgaaaagctcntgtcagagaaattttaatattagagttattggggagaagcagggatgaataaaggataacagtgggatggtgaggcaaaagctaggtcaccccaaatagtcctgagctgaagagcttgcttataccttaggatcagggttaattttaaggcagaatcagatagataaagaggtaacaccaaagatagtcattaagtctctctcctccctctgttctctctctaatctttagtgtttgccaaactttctctctgcacatattaaacattcagattttgtggccaaggcctcagactgatggaagcagagtatgcggaaaagatgattctta

SEQ ID NO: 2858 - DNA, 661 bp, Homo sapiens
  misc_feature [331]..[331]: Chromosome 6, SNP identification no. = rs2145368
  misc_feature [331]..[331]: allele = c, c, in linkage disequilibrium with rs507500, rs932614, respectively
  misc_feature [331]..[331]: n is a, t, c or g
tgaactcaacttctgtcatatgtgtttgcttagctttggattctggtcacacagtttctgagcccattatctcatcttggttctggtttttctctctctacttaatatttcagattggcattaaaccgagtgaattccctttctgattaatcttgccagagcagcccagaaaaaaatgatctcaataccttctcctaatatttgagggaattggatgttaaatagattcacagtaactgaagaatagttgtggaagggaatttttaaaaatagttaacacagaattcaaaaagtacaaaaaaagcaataactaagaagtataattcttctntcctgtttctgccagctacaaagttctcctgcatgaaggccactggcattttatgaattgttctggagatactctaatgagtttacaaacatttgtgtaatatttgtgtgtatatttcttttacacaaacgtatcatgccatctactctgctctgcatgttgttgttgttttacataatttatcttagagattgttatagattgaattgtatccccccaaaaagtatcttggagtcctaacctctaatacctcagaaagtgaccttattggaaataagtttgttgcaaatgtaattagttaagatgaggtcatactggagtaggacgggc

SEQ ID NO: 2859 - DNA, 661 bp, Homo sapiens
  misc_feature [331]..[331]: Chromosome 6, SNP identification no. = rs2180743
  misc_feature [331]..[331]: allele = c, c, in linkage disequilibrium with rs507500, rs932614, respectively
  misc_feature [331]..[331]: n is a, t, c or g
taaatagattcacagtaactgaagaatagttgtggaagggaatttttaaaaatagttaacacagaattcaaaaagtacaaaaaaagcaataactaagaagtataattcttctctcctgtttctgccagctacaaagttctcctgcatgaaggccactggcattttatgaattgttctggagatactctaatgagtttacaaacatttgtgtaatatttgtgtgtatatttcttttacacaaacgtatcatgccatctactctgctctgcatgttgttgttgttttacataatttatcttagagattgttatagattgaattgtatcccccnaaaaagtatcttggagtcctaacctctaatacctcagaaagtgaccttattggaaataagtttgttgcaaatgtaattagttaagatgaggtcatactggagtaggacgggccttcagtccaatgtgactagtgtccttataagaagagacagagacatagaggaggaatgccatgtaacaacagaggtggagattggagtcatgcaactgcaggccaaggaaccccaaggcttgctggcaaattaccagaagctaggaagaggcaaggaaggattctcacctacaggtttcagagggagcatggcactaccaacaccgtgatttgggac

SEQ ID NO: 2860 - DNA, 661 bp, Homo sapiens
  misc_feature [331]..[331]: Chromosome 6, SNP identification no. = rs7762072
  misc_feature [331]..[331]: allele = a, a, in linkage disequilibrium with rs507500, rs932614, respectively
  misc_feature [331]..[331]: n is a, t, c or g
accttattggaaataagtttgttgcaaatgtaattagttaagatgaggtcatactggagtaggacgggccttcagtccaatgtgactagtgtccttataagaagagacagagacatagaggaggaatgccatgtaacaacagaggtggagattggagtcatgcaactgcaggccaaggaaccccaaggcttgctggcaaattaccagaagctaggaagaggcaaggaaggattctcacctacaggtttcagagggagcatggcactaccaacaccgtgatttgggacttctgttacagtaggtagctagtcaggcatgagaagggcagganagggccccccaccaccatgaatgtcagacaaccatcaggtgatgatcaggcagttgttaactgtctctctaaaataataattggttacagccagtgccagggaaaggcagtctccttatgcatagaaaaaacctgaaactggtgatcagcagcttcctggtatgtatcaggagtcgggcaagtaggttcaagcatgcacattaagaggcaaaatggcgaagtttaactggtatatgaccttccagggacatgccaccagtaagggaagaatgcctcaaatgagcatgttcacctcccgactgctagcagaccactgtgcatgaggacagc

SEQ ID NO: 2861 - DNA, 661 bp, Homo sapiens
  misc_feature [331]..[331]: Chromosome 6, SNP identification no. = rs13191698
  misc_feature [331]..[331]: allele = g, in linkage disequilibrium with rs507500, respectively
  misc_feature [331]..[331]: n is a, t, c or g
cagccttaggaagtgaatacagagatctttccatattaatagagaagtgtttcattctatttgacagctgcacagtactctattgtatggttgggccataacttatctactggataaaataagttatggacatttatgtgatttttaaacttttgtcattaaaaacaatgcagaaagtgagcaaatttgtacatgtgtcaattcacatgagtgagactatcttgagctaaatacctaggggtagtgaataatcaaattgaaataagatgctttgcatgtgaacaagtgaagaattattgagacttgagtaaccctaagtttccacagaggntatagtaaaattgtgtgccagccaataattatgctaagtaggatgactttgtcttgtctcctctcccatccctccccaaaattgtttgccggctatgtaaccttttagataagcctctgttctctccggatctctgctgcagttgaatttctaatgttctattacctaacatcttagggtggttataaggatcaaatttttaaaaagtttgtgaaagcaatttccctacataaagacagggatttgctattgtctttggtgtaaagcaatgtttgataactttattatgcctttcatccacatcctatccacaaacacttgttctgggtt

SEQ ID NO: 2862 - DNA, 661 bp, Homo sapiens
  misc_feature [331]..[331]: Chromosome 6, SNP identification no. = rs13207433
  misc_feature [331]..[331]: allele = t, in linkage disequilibrium with rs507500, respectively
  misc_feature [331]..[331]: n is a, t, c or g
ccatattaatagagaagtgtttcattctatttgacagctgcacagtactctattgtatggttgggccataacttatctactggataaaataagttatggacatttatgtgatttttaaacttttgtcattaaaaacaatgcagaaagtgagcaaatttgtacatgtgtcaattcacatgagtgagactatcttgagctaaatacctaggggtagtgaataatcaaattgaaataagatgctttgcatgtgaacaagtgaagaattattgagacttgagtaaccctaagtttccacagagggtatagtaaaattgtgtgccagccaataatnatgctaagtaggatgactttgtcttgtctcctctcccatccctccccaaaattgtttgccggctatgtaaccttttagataagcctctgttctctccggatctctgctgcagttgaatttctaatgttctattacctaacatcttagggtggttataaggatcaaatttttaaaaagtttgtgaaagcaatttccctacataaagacagggatttgctattgtctttggtgtaaagcaatgtttgataactttattatgcctttcatccacatcctatccacaaacacttgttctgggttatagacctgcttctcatatttatgtttact

SEQ ID NO: 2863 - DNA, 661 bp, Homo sapiens
  misc_feature [331]..[331]: Chromosome 6, SNP identification no. = rs1321622
  misc_feature [331]..[331]: allele = t, in linkage disequilibrium with rs507500, respectively
  misc_feature [331]..[331]: n is a, t, c or g
taatcaaattgaaataagatgctttgcatgtgaacaagtgaagaattattgagacttgagtaaccctaagtttccacagagggtatagtaaaattgtgtgccagccaataattatgctaagtaggatgactttgtcttgtctcctctcccatccctccccaaaattgtttgccggctatgtaaccttttagataagcctctgttctctccggatctctgctgcagttgaatttctaatgttctattacctaacatcttagggtggttataaggatcaaatttttaaaaagtttgtgaaagcaatttccctacataaagacagggatttgcnattgtctttggtgtaaagcaatgtttgataactttattatgcctttcatccacatcctatccacaaacacttgttctgggttatagacctgcttctcatatttatgtttactatgtttcactacatagtaatttattagtcttctcctttatatttgcccacaacagtatagtatctttcctacaaatgatacaacctaataaatatttattcagtgttgttttagactaaatgtttcatcagtgaaatttttttatttcctaaaatggcctgagcatttactttagagtacagtttccatgaaccactttttccctctttcttctcttt

SEQ ID NO: 2864 - DNA, 661 bp, Homo sapiens
  misc_feature [331]..[331]: Chromosome 6, SNP identification no. = rs9353066
  misc_feature [331]..[331]: allele = a, in linkage disequilibrium with rs507500, respectively
  misc_feature [331]..[331]: n is a, t, c or g
cacaaatgtaaatagcctgaagggatttcataatcaaccattttcagtcatcagcaactctgtgtgaattggcccattagattcttttcctgctgacaacggatggccaggaagaaagtgtgaattcaacagagaagtttcacagaaatgagctgtgctcagcctttgccataagagggcaaagtaagtccagtgacatgcatttcactcagtcttcttctctttctactgactgagcccggagcctttgagggaggaagtccagggattggaggggtatagagattgagctaaaaggaccttcttcattggcctgcaggctcaactcttnggcaaaatcgtgaagaagtagctgttacatttttctaaactttcagtttgacaagcataaggattaatttggcaaagctcaaaatgatatctggcagtcaaaatggttcatcacacctctttaaaacataatgttgggagtggctgttttctgaaccaagttacttactgaaagtattctgtactttccagccattttccctttttctcatttctgtggccattgtggggctgctgatctccatgtactctggtaggggctacttttttttaaaaggaatctttctttttttttttttattgagataaaatatacatacacaatttacta

SEQ ID NO: 2865 - DNA, 661 bp, Homo sapiens
  misc_feature [331]..[331]: Chromosome 6, SNP identification no. = rs6907015
  misc_feature [331]..[331]: allele = a, in linkage disequilibrium with rs507500, respectively
  misc_feature [331]..[331]: n is a, t, c or g
attggcccattagattcttttcctgctgacaacggatggccaggaagaaagtgtgaattcaacagagaagtttcacagaaatgagctgtgctcagcctttgccataagagggcaaagtaagtccagtgacatgcatttcactcagtcttcttctctttctactgactgagcccggagcctttgagggaggaagtccagggattggaggggtatagagattgagctaaaaggaccttcttcattggcctgcaggctcaactcttaggcaaaatcgtgaagaagtagctgttacatttttctaaactttcagtttgacaagcataaggattantttggcaaagctcaaaatgatatctggcagtcaaaatggttcatcacacctctttaaaacataatgttgggagtggctgttttctgaaccaagttacttactgaaagtattctgtactttccagccattttccctttttctcatttctgtggccattgtggggctgctgatctccatgtactctggtaggggctacttttttttaaaaggaatctttctttttttttttttattgagataaaatatacatacacaatttactatttttacttttctttctttcttttttttttttttttagacagagtttcgctcttgtcgccctggctg

SEQ ID NO: 2866 - DNA, 661 bp, Homo sapiens
  misc_feature [331]..[331]: Chromosome 6, SNP identification no. = rs6930014
  misc_feature [331]..[331]: allele = t, in linkage disequilibrium with rs507500, respectively
  misc_feature [331]..[331]: n is a, t, c or g
tgctgacaacggatggccaggaagaaagtgtgaattcaacagagaagtttcacagaaatgagctgtgctcagcctttgccataagagggcaaagtaagtccagtgacatgcatttcactcagtcttcttctctttctactgactgagcccggagcctttgagggaggaagtccagggattggaggggtatagagattgagctaaaaggaccttcttcattggcctgcaggctcaactcttaggcaaaatcgtgaagaagtagctgttacatttttctaaactttcagtttgacaagcataaggattaatttggcaaagctcaaaatgatanctggcagtcaaaatggttcatcacacctctttaaaacataatgttgggagtggctgttttctgaaccaagttacttactgaaagtattctgtactttccagccattttccctttttctcatttctgtggccattgtggggctgctgatctccatgtactctggtaggggctacttttttttaaaaggaatctttctttttttttttttattgagataaaatatacatacacaatttactatttttacttttctttctttcttttttttttttttttagacagagtttcgctcttgtcgccctggctggagtgtgcagtggcgggatctcg

SEQ ID NO: 2867 - DNA, 661 bp, Homo sapiens
  misc_feature [331]..[331]: Chromosome 6, SNP identification no. = rs9353067
  misc_feature [331]..[331]: allele = c, in linkage disequilibrium with rs507500, respectively
  misc_feature [331]..[331]: n is a, t, c or g
tgtttcaatccaaatattactctgttattgatttattgaacttgtcatattatctcgttgtgaaatttttcctttacgaaaaaattttctctaaataaagaagcctcctttttcaataacagtattatttttattaagttactgactccttcttctctgcctaaaaaacatgttcaagcctctctctaccacatatatatctttccttggacactgttttctactcaagtgaatgctttatgtctttgcttcctttcctcatagactccacgtcctaacctatcattttctcatcaatcaactataataataccattatatgtaataggcnatatttgttgagtgaataatgtgtaccaggcactgtgcagcttacattttttccaggaatcaaataaagtaggtatcattagtagctttgtttatacagatgaaaacgctgaggcttaaacagtatgagtagtttgctcagcaagtcagtgagtaggtggcaaccacagaaactccagttttgtcctataggtgacatctaagtcattgccattatccacaatgtatctaccaacttactgtaactcaatcactgaatcttgaaatacaaggatctatctctactcttcatcatattcaatctcccagcttcagtcacaattgggcatct

SEQ ID NO: 2868 - DNA, 661 bp, Homo sapiens
  misc_feature [331]..[331]: Chromosome 6, SNP identification no. = rs9353068
  misc_feature [331]..[331]: allele = t, in linkage disequilibrium with rs507500, respectively
  misc_feature [331]..[331]: n is a, t, c or g
tgttgagttagcctcttaaattgtctcttaaatgttggtatgatctaaatttcttttgccctctgaatgtcttctctgagtgatttcagtgactcctatggcctctacaatgatctcaactctaattccaggatccctttctcctgagctccagatttatctctacttttataggtaccacaacctagaaatatccaaatcaacctcattatctttcattcgaagtctatttctctgcatttcctccctcattctacaatatattttatataaacatacaagctaatagatggagtaagagacgttttttatgtcccttttcctttcattnccacatttaatcagtcatcatgtcttacgttttcttttcttttttttttttttgagacagagtttcgcttttgtagcccaggctggagtgcagtagtgtgatcttggctcactgcaacctctgcctcccaggttcaagcaattctcctgcctcagcttcagaagtagctgggactacaggcatgtgccaccacatatggctagttttgtatttttagtagaaacggggttttgtcatgttggccaggctggtctcgaactcctgacctcaggtgatacacccaccttggcctcccaaagtgctgggattaagttgtgagccaccgtgccc

SEQ ID NO: 2869 - DNA, 661 bp, Homo sapiens
  misc_feature [331]..[331]: Chromosome 6, SNP identification no. = rs2024996
  misc_feature [331]..[331]: allele = a, in linkage disequilibrium with rs507500, respectively
  misc_feature [331]..[331]: n is a, t, c or g
aacagcaaccctctgagaagctgtgtggagcatccctcaagtcatcctttcttggatgatggggaggctggggcatttatccacttaccttccttccccattggttgatgggtgtccctggtggcatgaacccctctcacttcagggttgcatttgtttttgacagagcaaaccccatggtgttggagaatcaggagaagaagagagaggctggtctagaggtgcagagctttcagcaaactgcttaccacacctaaagtgaattcaggtgggccccgcaggtatggggtgtggtgttgacagggtctgctacacttggcaagggttaagnttagaattagagtcaggattagtaaactctgataggttgaagtaaacaaagaaaaaagagcatcagcatcaacctctcccactctttcctcaggatatattgagaaccacattttggcaaagtgtgtataaactattaataaagtatcatttatttcatagtttttgataaaatatgtaaattgaaactctaatattttctttccacacctggaaggtcattttgaatatctcttgggagcctgcatctcttccttatgatcagtttcctagcacagcgactcaagggcctgatgcgtcaggctgctgagatatctatctgttccgacaa

SEQ ID NO: 2870 - DNA, 661 bp, Homo sapiens
  misc_feature [331]..[331]: Chromosome 6, SNP identification no. = rs12527551
  misc_feature [331]..[331]: allele = a, in linkage disequilibrium with rs507500, respectively
  misc_feature [331]..[331]: n is a, t, c or g
taaaagagagggagaaagaaaggccatgacatgtgtctgcaagttgatctatagagcaagatcaattattgcatcatagatgtttgtaattgtggtgaagccaaaattttctctaaacacatttttggcatcatccacaatcctatattttaatttaggtaaatgaatttcagtaatttgatattgaaaggacattgattaggtaactcctatatgctaagccactgtaaaaagtggtatggcttatttcaaaataagtaaaacttggtctcttacttacaatctagcaggagaaatgcatgctgcatataagtaactgtaaaacaaggtngtcagaactaagatctgtaagaaaaataccatagactgtgaaaattctaagaaattatttctgcaacaagtaatttattatttcatatggtactagataaacttaacccaaattccatggcctagcaatttccttaaacctagtctatttgggagtctaccaagctgacatttagtaataagcagatttgggtttagaaaagacaaagagatctgagataggcctttacctcagtgtcaactatactgggccctaaaaaggtctttgagagacaaaaccaagtacttctttaatgtcctgtggcctagttttaagccataaattttttct

SEQ ID NO: 2871 - DNA, 661 bp, Homo sapiens
  misc_feature [331]..[331]: Chromosome 6, SNP identification no. = rs9344270
  misc_feature [331]..[331]: allele = a, in linkage disequilibrium with rs507500, respectively
  misc_feature [331]..[331]: n is a, t, c or g
ctgtcacccaggctggagtgcagtggcatgatctcagctcactgcaacctccacctcctgagttcaagcaattctcctgtctcagcctccccggaagctgggactataggtgcgcaccaccatgcccggctaattttgatatttttagtagagacaagatttctccgtgttggctgggctggtctcgaactcctgacctcaggtgatccaccttccttggcctaccaaagttctgggattacaggcatgagccactgtgcctggccttaagccataaactttttaaaatacaaaagcaaacactgaaacaaaaattatgcaatatttgtantgacaatgtatcgcagttttcttgagcatgcaaatattttctcaataaagacttaatcataaaatagaacctatgtgttgcatcttttgtttctttgtttcttttctttctttctttttttttttttgacagagtcttgctctgttgttgcccaggctggagtgcaatggggcaatcttggctcactgcaaactctgcctcccaggttcaagcgattctcatgcctcagcctcctgagtagctgggattacaggtgtgtacaaccacgcccagctaagttttgtatttttagtggagatggggttttgccatgttggccaggctggtctt

SEQ ID NO: 2872 - DNA, 661 bp, Homo sapiens
  misc_feature [331]..[331]: Chromosome 6, SNP identification no. = rs796398
  misc_feature [331]..[331]: allele = t, in linkage disequilibrium with rs507500, respectively
  misc_feature [331]..[331]: n is a, t, c or g
cactgcagactccgcctcccaggttcaagcaattgtcctgcctcagcctcctgagtagctggaactacagatgtgagccaccacacccagctaatttttgtatttttagtagagacggggtttcaccatgttggccaggctggtcttgaactcctgacctcatgatatgctcgccttggccttccaaagtgctgggattacaggtgtgagccatcccacctggtctaactcttttactttcaatctatttgtatctttgaatctaaagtgtttctcctgttgacagcatgtagttacatcatgttttcttatctagtatgacaatccctgncttttgattggattatctaatcaattcacatttaacactagtatctatatagttaatgtttgcagttttaatttttgttttctatttgtttaatatcttttttgttcctctattacccctattgtgttcttttgcattaagtgaatatttttagagtaatattttaattactgtaattactttttaaactatttttaaagttttttctcagtggttgctctagggtttgccatacatgtcttatcagagtctattccaaatttatacaaacttaattaaagtgaggtacagaaacattattcctatatagttctattccctctttctcct

SEQ ID NO: 2873 - DNA, 661 bp, Homo sapiens
  misc_feature [331]..[331]: Chromosome 6, SNP identification no. = rs770904
  misc_feature [331]..[331]: allele = a, in linkage disequilibrium with rs507500, respectively
  misc_feature [331]..[331]: n is a, t, c or g
acctgctgtgcttggggcagagcctctgtgtggatgggggctatgtggaggaggagagcacttgacttttctacaacactcaccaggaatttagcctatttatcttggattaaaggggataagaaacattgacagtctgccccttctggtgagatgtgttaacacttgattgggagctaaggagggaatccatcttcttggccacacccacttggagtagagcttctttcactagtgtccttttaaacgttacggttctggctaggcagagacacagactgggccttcgctaggtggagacaaattcaacctttgctgtaaagggcctagntttggaatggtagttgtggagagtctgttttctgagaagccggtaataattaacgatcttatttaatccccatttacggatgaagtgaaagtatcctaattcacataaataggaatgacaaaacgggagtcaaagtcaggtgagtctaaccttgaaggcctaaatcatattctactactcactgaaggaacaatttcttcctccattaaaactagagaattcccaaaaattataagggaggagaaataaataaggggttagaaggaaagaataaaaaaaattcaacagaattggtctggatttcccaggaactacctcataactggggga

SEQ ID NO: 2874 - DNA, 661 bp, Homo sapiens
  misc_feature [331]..[331]: Chromosome 6, SNP identification no. = rs770897
  misc_feature [331]..[331]: allele = t, t, in linkage disequilibrium with rs507500, rs932614, respectively
  misc_feature [331]..[331]: n is a, t, c or g
tatggatataaaacaactctgttccaaatggctctgaccttcctcctaagaccagtgaaatagcctaaacatgctattcttatggcaacaggttaagcacaagagcaagcaaacgtaaatcatgtaaatcctttttaagatactgcttgcctaacatctgccaatatgctataaaccaaagcaaatcacatactaaagccaaggtgcatggaattacatcccaaacaaagtgaaagggccctacaaagtggcatggcaaaaggcttgtgtaaaggaaggtctgaagaaatggggctattgatgccatctaccatgaactgacataccaccntttctttaaacaccgcccacgaggatgttttcagtcttgtgctattacaaacaatacagcaatgactgagtacattgtcatcttccacacaggccagtatatctgtaggataaatctttagaagtgaaattcttggttaaaggatataggtttttgtaattttgataggtgttgccaaagcactgttcagacataattgattgtaacaattatatttccaccaacaatgttgggactatgttatcattaaaaattttttttccagtcttacatgtgaaatgtaatctttgtatggctctgatttgtatttttcttgttaaaaataagatt

SEQ ID NO: 2875 - DNA, 661 bp, Homo sapiens
  misc_feature [331]..[331]: Chromosome 6, SNP identification no. = rs770898
  misc_feature [331]..[331]: allele = g, g, in linkage disequilibrium with rs507500, rs932614, respectively
  misc_feature [331]..[331]: n is a, t, c or g
atttattcactgtgaaggtaagaatacagacataattctaagtagcataacatcacagaaaacttatttaaaatttttttctcttttgaatttaatatttcagatacatggtatttagtcagcctctatattttaagtaatgaccaagagaaattctaataattctttattaaagagtcaagtttgattatgatgaagtgaaaaaatacctagagaaagaataggataagacacttatctgtttcaagaacctatcttatttgattgaaattattgtcttttaaaaggaagttatggtaaatatttaaattagcaatgttacctaatatcnttttttaatgtacattatttccacttcggaggtgacacggaagatgtttgcagggattcttgtcaaaatgttcttacccaagatgggttctaaaccaagactggaattcagtcaagaaatgggagcagttgcaattgtagccaccatccaaactcaattaatttcaattaaatttaacacagttcaataaatgtttattaatgtgcttttctgtagtactcactttgtcttccaaacagggctacctccaaagccagcaatttcccttaaaaaaatttacaatactggcacattgacaggcaatctattgcatatccatggcagaggttc

SEQ ID NO: 2876 - DNA, 661 bp, Homo sapiens
  misc_feature [331]..[331]: Chromosome 6, SNP identification no. = rs770894
  misc_feature [331]..[331]: allele = t, t, in linkage disequilibrium with rs507500, rs932614, respectively
  misc_feature [331]..[331]: n is a, t, c or g
tctctgtctcaaattagcaaaggaattgaatacacgtgaaaactgtcagatctgaaaagtaactaaaacaaagtcaagtgttggtgaacaacaagcacatatgtcaaaaaaccatgaaccaacacttaaaactaaaaccatcaacttgagggtcaatttgacaaaaaaaaaaaaaaaaaacccaccagaaattgtacatgtatatgtgtatattcatgaagaaataattttttaaaattgtcagtgattaaaaagaaaacttcaagtcactttaagtacttgaagtgtgtaaacttctgagatgtgtaaactaaagtaaaatgtaaattanggaatgggtcaaaaggaatgtatttgtctcatcagtcagtacaataagtgctgcggctagtaaaagaaaaatatagccctctatatctgtgggttctatatccctggattcaaccaaaccacagatagaaaataatcaaaagaaaataaatgggtggttacatctgaaccaaacatgtacagactttttaaaaaattatcattatttcctaagcaatacagcagggcgcggtggctcatgcctgtaatcccagcactgtgggaggccgaggtgggcaaatcacttgagatcaggagtttgagaccagcctagccaacatggtgaaaccct

SEQ ID NO: 2877 - DNA, 661 bp, Homo sapiens
  misc_feature [331]..[331]: Chromosome 6, SNP identification no. = rs770895
  misc_feature [331]..[331]: allele = g, g, in linkage disequilibrium with rs507500, rs932614, respectively
  misc_feature [331]..[331]: n is a, t, c or g
acgaaagacatagacacggaagcaaaagctctcaatgcagaattgagtacggtttggtgtgtgtatctttccagtcaatgccctctctctttataaatatttcaattgtttctgctattttttatgtgaatgggatcatagtatatgaattattcgcattttttcttttttaaaaacaaccatctatttttctgtgtgcatacatataggtatgcttctccttttttaaagactgaaatatttcaaactgtagattgttgtaccacaatttatttaacagccttattgaaagacatttagatcagtaaatactttttaaagaagtttcctncaagtgagaaaagcttactaggatcagttctattttgattgtcttaagcatttaattatcccaaattatcatacttactttactcctgacagcttgaaaattttttgtgcatgatgctatttacatactctaaggcagggcagaggattgcagagcacatttttcccaatttattcttctattccaaagtgaaataaaggaaggatctgaatgtcccgacagataagaaccaatttagtgtatttcaagaggtcactttgtagcctgcaggaaacgtttctacactatcatttatttacaagattgtttctacagggaccatttttcttc

SEQ ID NO: 2878 - DNA, 661 bp, Homo sapiens
  TPBG
  misc_feature [331]..[331]: Chromosome 6, SNP identification no. = rs1570140
  misc_feature [331]..[331]: allele = a, a, in linkage disequilibrium with rs507500, rs932614, respectively
  misc_feature [331]..[331]: n is a, t, c or g
acctttggcagtgacgagatagatttaggcatgacagagcagcgcgaagcagcagcagaaagaaatgagctgaaaatctactgcggcagcagcaaaggcacggcaggttgtatggaagcttcagaagctctccccatcaaagtggtacttgaggccgcaaacttcagatttaggtgtaattaatgccttcccgcctgtcccccccgccccctcacttcttgggtagtgatggaacttgtgaagagagcgcgccaactttaagagagagagagagagaaagaaaaaaaaaagattagtggagaggagattcattcctgattcattagctttnctcttaccaaaattaaaagcagatggaagagaaaggcagccaaaggcatcccagaaacaaaaggcaaatagcaaagacttgagtctcccggaaagcggacccgcccccctccccagatgtagcgcggtgtgtcaagtcacttctgtggagaaagctccaaggatgaggagtggggattgcaggagctgacctgggagagaagtttggtttcaaagtcgattgtcccagggggcatctggcagatggtgatggagaggatggggttggggagagggacaaattgaatggttggttaccggaaggatctgttattataccagacaggttttg

SEQ ID NO: 2879 - DNA, 661 bp, Homo sapiens
  TPBG
  misc_feature [331]..[331]: Chromosome 6, SNP identification no. = rs770911
  misc_feature [331]..[331]: allele = c, c, in linkage disequilibrium with rs507500, rs932614, respectively
  misc_feature [331]..[331]: n is a, t, c or g
gagcaccccccaggcatcgcggctcgcgtttccccggagctgggctgggacggcgcccgctccgaaggctcgggaggctgggcccggagggcgcgagccggcggaagcgtctggaaaaaaaaaactttcctctcgtggaaccgagggagtggcgccgcagccggaacttggctaaccccctcgccaccgggcgcttccctcaggggccgattcccccgccccttccctccagaaagtacgcacggcgggtcgggacgctccgctccgcgctcctgctcccgctcctcttcctgccgccgccctggtgccacctcttcgcctcttgttggcncccctcgctggatcctctgagggacctgggacaagcaggagagaggcgtgaacagcggtggctgccgcggcttccggagtgcaaaaaccggccttttcgagtctagtcgtctccagtctgtcccagagacctccttccaaaagcccgccccggcctcgcctccccaacccctccggtcacttttactccggagggggacgcgcatccgacacccagaccgcaaagtcttccttcttccctggcccacactaaataaacccgaccggcctcccgccctccgcctttcccgaggagactcgtctcccgcgtctaacttaccgcttaatcccc

SEQ ID NO: 2880 - DNA, 661 bp, Homo sapiens
  misc_feature [331]..[331]: Chromosome 6, SNP identification no. = rs1275806
  misc_feature [331]..[331]: allele = a, a, in linkage disequilibrium with rs507500, rs932614, respectively
  misc_feature [331]..[331]: n is a, t, c or g
aaaggtactcatgctagcttcccaaaattcacataaattataagccttttgcaatctgcagcataaatactacatatgatgtgagaaaattgagatgtagtgtgtgtcctgcatatgtaaagacagtaaactggcacttcagcagccaagctggcagtgttcggctggtcagtcccctggttttccagggtgataatggatttgcattgatttaactaacttccctgtttggtccaggcccttagaggatggcagcatgcacctggagtgggcgtgagctaggagaacacagcagagaatgcaaagctgactgtctcacctggtgactgantgacttaatggtcacgaacttggtctcatttgtttagttttctcaccagctgagcttaactcacatttaaggttgaattatacaaaccagcactgcattccagagtttttatttttcttttccaaagaaatatcaccattaaatttccaaaatacttcctattatataatagactcataagattgttatgaaaaaatcatttcaaaaacattaaatgttttcgggggttaaaacatggtaatttttaacaaagtaaaatctagagcaaactgaagcattcactcaaagcaacaacaataaaacaaacaaattcaccaaagcaattgcatg

SEQ ID NO: 2881 - DNA, 661 bp, Homo sapiens
  misc_feature [331]..[331]: Chromosome 6, SNP identification no. = rs770906
  misc_feature [331]..[331]: allele = g, in linkage disequilibrium with rs932614, respectively
  misc_feature [331]..[331]: n is a, t, c or g
aaaaagtcacattatgcaagtaataaacctgtgcatactctcttggtgtgtgtgtggtctcatcagtcttgatatccaaaccaatttgggaagggtgttgatctcatctttgttgggtacagccacagctatgcatataactcctttgctcgtagacttccaagagctcccccactgtccactaaattgtatagaaactatttatgatagcttccatctagaaagataaatttatctttctagtcttatactccattattctcctttgtaaacattacatttcaaatgttactgttcccagaaaacacttggtcttcaattgcctccattntctttgcttatgctattctctctgtcctgagttttcttttctacccatcatctctctttgcctcttcttcaaaatcatcttaaaagctaactcttccatgaaccctttttggattctcctgaccagacaagatctctccttactttgaacctgatatcaccttgtttgaatctctggtggggtttatcatgttctatgctagaaaaagcacagacatgatcgtcattcacatctcctctagagcaggagttaagagcttggatcctgaaggctcccccaacatcctccccagaaaaaaacaacagttcaaatcccatatctgattcttac

SEQ ID NO: 2882 - DNA, 661 bp, Homo sapiens
  misc_feature [331]..[331]: Chromosome 6, SNP identification no. = rs6454268
  misc_feature [331]..[331]: allele = g, in linkage disequilibrium with rs932614, respectively
  misc_feature [331]..[331]: n is a, t, c or g
ccatcaacgtaatatcatatctgtgttcctggaagaaggtggatgtgatgaagatcatggcagcagagattgtgtaggagggcagggttattgagatacctcatggacagtcaggtaaagttgtattgtgtccctttgaaggtgaaggcaaattggaactgagaggctgttgaaatagaaacttaatagaacatatttgccacatgtataataggaaagcatttttcagttactgattggatagagtcaataatttcaataatatcaggtatgagagccttaattgaggcaccgtgccattaaggttgtgataatctgctgttagatgccnttcattgttatcaagtttgagcgttggccaaactgggcaattaaaagggaaaatagcaggaatgatggcgccttccttttggaagtcttagatggtgggttttaattcctgtaggtcttggtttaatctatattggactttttaactattttagctgtgagagaaggtccatggtcttggtttaatctatgttggactatactaactaatttagctgtgaggaaaggtccatggagtcccattttggtaagccaattttaagtgccaaaaacttaattttatttgggagaccgaggtgggcagatcacgagttcaggagatcgagaccat

SEQ ID NO: 2883 - DNA, 661 bp, Homo sapiens
  misc_feature [331]..[331]: Chromosome 6, SNP identification no. = rs6911109
  misc_feature [331]..[331]: allele = g, in linkage disequilibrium with rs932614, respectively
  misc_feature [331]..[331]: n is a, t, c or g
gggggttgtgaaggagtaagaagtagggaatgggaataactgtggatttattagtttgcccagatgtggggtgagagaataaaagggaggggtagtatatatacataacttgtttctcttctgcatgtatggtatatgggattatgggctaagtgacccaaataattcaaagtttttatttttttattttttgatgttaaactataaacaatcactacattttgatggcatttaacatatgtgaagaatgataataaaataatagaaaatcctggttaagatattgtatatggaaaagaggaccataggaatgccatttacaagtctaaantggaaaaaaaaatagctcaaaaatgaagcacttcccttaaaagaatagtaacactattttactttgactatccagatgtgctcatagattttctttgtgacattaaatgatccgtttttatgctattggctgcatccatttttgcaaaaatgctttccagaaactgaaacttagttttgaatattggtgtaacaccattgtagataagtaagacatttcaagccttgttttgaatgtgttgaccttaattatcagatctgaggtctgcatttatcatatgaatcaaatggttatgaagttctccttttaaagttaagaaaactttgtcat

SEQ ID NO: 2884 - DNA, 661 bp, Homo sapiens
  misc_feature [331]..[331]: Chromosome 6, SNP identification no. = rs932614
  misc_feature [331]..[331]: allele = g, a
  misc_feature [331]..[331]: n is a, t, c or g
agttgtttctttggactgaatggtaattttggttttatgaccaataaagccacttaaaataagaagcagctgatttgtatgtgaagctgcaggttatttgaaaaatacctcgattgcagtgtacatcaggtcagtttacataagcagcagaggagcccttaaagctgggccttggtgaggacatagggattagcactctggcagacacatgagaagggcaggaatgcttgttctcagcttttctaccgagaggacaactgtccaaccaagattaagctgaaaagacatgacaaagttttcttaactttaaaaggagaacttcataaccatntgattcatatgataaatgcagacctcagatctgataattaaggtcaacacattcaaaacaaggcttgaaatgtcttacttatctacaatggtgttacaccaatattcaaaactaagtttcagtttctggaaagcatttttgcaaaaatggatgcagccaatagcataaaaacggatcatttaatgtcacaaagaaaatctatgagcacatctggatagtcaaagtaaaatagtgttactattcttttaagggaagtgcttcatttttgagctatttttttttccattttagacttgtaaatggcattcctatggtcctcttttccatata

SEQ ID NO: 2885 - DNA, 661 bp, Homo sapiens
  misc_feature [331]..[331]: Chromosome 6, SNP identification no. = rs9344274
  misc_feature [331]..[331]: allele = t, in linkage disequilibrium with rs932614, respectively
  misc_feature [331]..[331]: n is a, t, c or g
ctggcaatggcttctggagattctggcagtgccgtagtctccacgggagactgaatgcatgaatttggattaagtacaaccgtgagtggcagaagttgaggtacatgtttttttctttcatgttaagagaggaggtttgaatcaagaagcgatatggcaactttgttccacaaatttctcgggagatttctagccttattgctcctctatgcctagtagttagccctaatccttttggtatgaattggcttgagtctagaatcctgtgaggataagcccttgggaggctccactttgtcctccagtaacaagtggactagtctttacaggntgccttttatgtctgtgcgtgtgtgtgtgtgtcaggagagaggataaactcagcttctctacatatattttttctgactcttaaccatgtagtttgcatattgaaaaacagagtatctattaattgcaactgtggtgaaagccctacatttccttttgggctatgtggggttttgtttttgtttttccttctgtagctgaaatgaactatctcactgtgattcacattagtgaggtttcaagaatacttattcaagactttctaagggtcaaggccataggggcatatggggaacaaaagatgaataagaatagaattggtacattctta

SEQ ID NO: 2886 - DNA, 661 bp, Homo sapiens
  misc_feature [331]..[331]: Chromosome 6, SNP identification no. = rs1951006
  misc_feature [331]..[331]: allele = t, in linkage disequilibrium with rs932614, respectively
  misc_feature [331]..[331]: n is a, t, c or g
aaatttatctatcagacagttttccaaacacattttcttttttaccttcctctaaaatcttgttattcaaagtgtagcctccggaccaatggcttctgaactgagtttgttagaaatgtagaatctcaggctccacaccagaccttctcaaacagacactacactttaacaaacactctgaataattcctccacacactagtttgagaagcactgttataaaacacaactacacaggtttcttgtaaaagagagatgggttttttaattttcagaactaataaagtcaattttttttaattcgaaaacttttcctatttaaaacaattcanataatgaatgtaaaggatttttaacatggctctaaatttttctagaaatccccctccattttgttggaggtttgttataatagtcccaatatgcaataaacaagttacaagttacaaacaaaaggataattcttgatgccaaatataatagtaacaactagttttgtctgatgtaatattacaaataggccacgtttattattctgccctcgtttatcaaatattttgtatcttgtatgtagtattttcggaatttgtgataatggaattatgctgcaaatcctctgacaaaattataaaaagctttgttcagaacaagagtaacctctg

SEQ ID NO: 2887 - DNA, 661 bp, Homo sapiens
  misc_feature [331]..[331]: Chromosome 6, SNP identification no. = rs1321795
  misc_feature [331]..[331]: allele = t, in linkage disequilibrium with rs932614, respectively
  misc_feature [331]..[331]: n is a, t, c or g
gcatttcatgagcaatttacgtgtagttaaatttatctatcagacagttttccaaacacattttcttttttaccttcctctaaaatcttgttattcaaagtgtagcctccggaccaatggcttctgaactgagtttgttagaaatgtagaatctcaggctccacaccagaccttctcaaacagacactacactttaacaaacactctgaataattcctccacacactagtttgagaagcactgttataaaacacaactacacaggtttcttgtaaaagagagatgggttttttaattttcagaactaataaagtcaattttttttaattcnaaaacttttcctatttaaaacaattcacataatgaatgtaaaggatttttaacatggctctaaatttttctagaaatccccctccattttgttggaggtttgttataatagtcccaatatgcaataaacaagttacaagttacaaacaaaaggataattcttgatgccaaatataatagtaacaactagttttgtctgatgtaatattacaaataggccacgtttattattctgccctcgtttatcaaatattttgtatcttgtatgtagtattttcggaatttgtgataatggaattatgctgcaaatcctctgacaaaattataaaaa

SEQ ID NO: 2888 - DNA, 661 bp, Homo sapiens
  misc_feature [331]..[331]: Chromosome 6, SNP identification no. = rs9449462
  misc_feature [331]..[331]: allele = g, in linkage disequilibrium with rs932614, respectively
  misc_feature [331]..[331]: n is a, t, c or g
attgagtatggtactgacttctgtctactgattttctgagcctttaatacctctaataatggcccatactactggttcctgcccaggtgactatacagcatttacaggtgcaatccagtggatgctgtctaaaaacaaaatgaagtcttgggactattattaacctcattttgagatggaataataataataataataataatagactcaaaagggttaagaggcatgcacttttggcaggaatgggcaagtgaacctcagatgtagctgcaatgggcttccaacactggactttttccaggaaaggcattggcctctctgcttctctttngaacacagctgatttagccacattttgatgtggcatggtgtctgttaaagcaattccaaacatgaggggaatctccttgatgttatgttctatgtatatgtgtccatgtgcacatgaatgtgtgtgtgtgtgtgcgcgtgtgagcatgggtgtgtgtattttcacctctaactctcctactcctgaaccaccaagcagtgctggggctgtgagattttctgcctggatagttccctcttgtgccatcagattctgtcaacatttctctttatcttggataactctttcaggagtcacttaaaactaaatggaaggttatagaactaattt

SEQ ID NO: 2889 - DNA, 661 bp, Homo sapiens
  misc_feature [331]..[331]: Chromosome 6, SNP identification no. = rs9361914
  misc_feature [331]..[331]: allele = a, in linkage disequilibrium with rs932614, respectively
  misc_feature [331]..[331]: n is a, t, c or g
attctattgattaaaaaacttccaaataatgcatggttacatatttttcttggcatgataaacaaatatttgcttaaatgttctgtttaaaactttgatgaattgatacatttggacattgaaatgttatccaaagggaactgaaacattatccaaagaatatgcatttttttatcagaccacaaagctaacaaagcaagaaatacgtttccatatgtctcacctactagctcatatgatgggattcttctaaatttattttcatttggatgacaaaactgcatgcatttcagccagaagttttgaatggaataagatttcagaaattgtntgttgatttcaactacaatagattccatttatattttgagatagcactttatgtagtatttcaaagtgttagattgtatgaatagggagctggagtttggggaggcattcacagagtagcatgactaagaccttgggctatagaatcaaacaggactatgttcaaatcttggtctttctcacttcccatgtgcatgaacttaagcaaggtacatggcttatgtgagtcccaattttcccatttatttatttatttatttatttattttcaggtaattttttaattagaaattccaaattttaaataccacaatatgttatatcacagatg

SEQ ID NO: 2890 - DNA, 661 bp, Homo sapiens
  misc_feature [331]..[331]: Chromosome 6, SNP identification no. = rs714133
  misc_feature [331]..[331]: allele = c, in linkage disequilibrium with rs932614, respectively
  misc_feature [331]..[331]: n is a, t, c or g
cttcatgatataatttttctcccattcaaatgaagttctagatctgtggaatcttaacttaaatacttaactcctattaggctatgtcttgtgcaactctggccaatttcattaatttttcattgctttggtttcccaactgaaaaataaggatcataatgtagttccacctcttcatcacattctatagggttgggctaaactgagcacaaataaaatatttttatgtaataaaggtattacataaaaatattaatactcttgtaaatttttaattattacaattttaaaaacaacataattttccaaatagatgaggtgtaagtatatnatttaagtcatcattgagcttatcaggtgggcaggggacgaaactgatacacagatatttactgaccacattctaatgccaagcactttatatgcactatttcactcaactgtcattacagtctgaggtaaatactactataagatctactttataaatgggaaaattgcgggggaggagccaagatggccgaataggaacagctccggtctacagctcccagcgtgagcgacgcagaagatgggtgatttctgcatttccatctgaggtaccaggttcatctcactagggagtgccagacagtgggcgcaggtcagtgggtgcgcgcac

SEQ ID NO: 2891 - DNA, 661 bp, Homo sapiens
  misc_feature [331]..[331]: Chromosome 6, SNP identification no. = rs1998204
  misc_feature [331]..[331]: allele = g, in linkage disequilibrium with rs932614, respectively
  misc_feature [331]..[331]: n is a, t, c or g
agtagggacataaatgtctgttgatcttatcaaattatttttaagaatttagggattttgtcagaatcattaattcagccaacctggttagtccatttataccatagcctcaggtttcctatatccacatatgccattcagaattactaaggcatggaaagcgtctcacaaaagaaaaacttttacattatttaaacagtgtcgtatccacaaaataaacgatatgctgttcttggttcaccaagcaagcactttgccatctctgggtccccagtgaacagctactcattaaacccagatacatttggacatcagaccccctctctaacanggaaaggggtcaccacagggaggaatgcaggcctgccagtcagagtcatctcccaccagaaacctgctttaatgagcattttcttgcttctcagggcaatcctcatgctctcactgtgctctcagcaagaacacctgggattcttcagccttgccatgtgtggagaacagcccaaaaataggcctgctaagacttccaagatggattgctagactttgtgagtcacctctgaaaccaaaagctctgtgctttgtgatttttgtttgcatcattaggatgaggaatttcagcaaacctaaccacaattacctgtgactaatcttagcagat

SEQ ID NO: 2892 - DNA, 661 bp, Homo sapiens
  misc_feature [331]..[331]: Chromosome 6, SNP identification no. = rs1853143
  misc_feature [331]..[331]: allele = t, in linkage disequilibrium with rs932614, respectively
  misc_feature [331]..[331]: n is a, t, c or g
tgtgtatattagggctaacttaaaatatatatcccctgattctgctcagttatgtgatcttatacccattttactttctaccccaaagttactggttcctgaactaggaagtgctgtaattttagaagcttctaaaggaatgcaaattctttttggccaaatgtgactcacaatacaaacacaggaacaattgtttacttctgtaaattctaagatggtgcaggtttggtcagaaatgtaattaccttagggccagactagaataacagttaaataaaaactggaagagaagatgtttttatagaaattaagttatgggagagtaagatanatatccagaaagcaggtttctgcctttcagaggagaatattttcttaaagtttgtgaaagggtgcaaggggcaagggttggattggttctcagaccactgaggggattggcaggagactaaagtatggaaccactggggtgctggaactcacccacatgggcttgggagagccaattattatactgggattacaggtgtgagctagactgcctgacctaaaattttgttttttacaaagtaataaatactcaaaatttatcactccctaattatttaactacatttttactattatctgtgccattgaggttatttatgtctatttgtat

SEQ ID NO: 2893 - DNA, 661 bp, Homo sapiens
  misc_feature [331]..[331]: Chromosome 6, SNP identification no. = rs4706945
  misc_feature [331]..[331]: allele = c, in linkage disequilibrium with rs932614, respectively
  misc_feature [331]..[331]: n is a, t, c or g
caactatgcatttctttctaactctactttcggtaacttcgtgttgaaacttaaatttgataatggtgggagtatttacatgagggaaattggcaagcagcacagcttgatttattgttttgttgattatctaaatcaggattcagtaaaagagggcatgcttgctatgtgttgttataaataaagtttccctggaacacagccatgtccatttacttatgtactgtttgtgactagttttatgctaccatggcagagtagttttaacagagatgttagacccacaaagcctaaaatattcactgtttggcccattatagaaaatgtttcnatacccttcatctagactttaaaaagtgatgagtaaatgttaaaaatgcaaattaaacttaaaagcatgtttttttagtagctattacattgtgattagcacacaaaactgaggaaatacttttttcaatattggaaaactgttatctgattcagtaatcacagtattgactattatgtttgaacttaagtgtgctgaaccaaaaaaaggttttaatttaatgaatataatctgtatgatggtggaagatagcttaatagtagatcacatgtcagacttaatgacaaaaataaaaaaattagccaggcctggtggtgcgtgcctgtagtc

SEQ ID NO: 2894 - DNA, 661 bp, Homo sapiens
  misc_feature [331]..[331]: Chromosome 6, SNP identification no. = rs12211231
  misc_feature [331]..[331]: allele = a, in linkage disequilibrium with rs932614, respectively
  misc_feature [331]..[331]: n is a, t, c or g
agtgtgctgaaccaaaaaaaggttttaatttaatgaatataatctgtatgatggtggaagatagcttaatagtagatcacatgtcagacttaatgacaaaaataaaaaaattagccaggcctggtggtgcgtgcctgtagtcccagctattcgtgggaggggggaagttggggggtgagagaggaggattgcttgattccaggaggtggaggctgcagtgagccatgactgtgccactgcactccagcctgggtgacagagtgagaccctatctcaaaaaaaaaaaaaacaaaaaaaaaaaacaggcagaaaataggtgttgccaaggatntgaggacatggaaaagttggaacccttgtgccctgctggtgggaatgggaaatggtgtagctactatggaaacagtatggtgattcctcagaaaattaaaaatacaactactgtatgatccagcaatccctcttttgggtatatatccaaagaattgaaaacagagtcttggagagatatttgtgtacccatgttcataccagcattattcatgatagccaagaggtagaagcaaaccaagtatcttttgacagatgaatggataaacaaatgcggtatatgtatataccatggaatattatccagccttaaaaaggaaggaagtcttgt

SEQ ID NO: 2895 - DNA, 661 bp, Homo sapiens
  misc_feature [331]..[331]: Chromosome 6, SNP identification no. = rs9449469
  misc_feature [331]..[331]: allele = c, in linkage disequilibrium with rs932614, respectively
  misc_feature [331]..[331]: n is a, t, c or g
ttttagtagagatgggggtttcaccatgttggccaggctggtcttgaactcctgacctcgtgatccacccatgtcagcctcccaaaatgttgggattacaggcatgagccaccgcacccagcctgttatgcctattttaccacaatttttaaaaaagagttagtggattgagatacaactctgtttgtcaaattatagttaattgcaatcataggttggctatggatataggaattgagcaaaaatcaactaaagcattctgtgagaatcagttggaatttataataaagtatattgtatattttattatcattagtaaactgtgtgctanatgtcctttatattagtaaagtttagaataaacttacatacatatgtaacatatataatatcgtatattctatatataatatatatacacacacatacacacatattcccaacacagagctggttgttaatatttaccagcacaccactgtcaagattgggctttctcttatccaggaactgagatccgctctggtggaaggatcccaggtggcctgggttcgggttcccaggttctatgtctgactcctccacttaactatctgtacgactctgggcaacttgcttagttagactctcaagtgttagtttcctcttctgttaaatgaga

SEQ ID NO: 2896 - DNA, 661 bp, Homo sapiens
  misc_feature [331]..[331]: Chromosome 6, SNP identification no. = rs9449470
  misc_feature [331]..[331]: allele = g, in linkage disequilibrium with rs932614, respectively
  misc_feature [331]..[331]: n is a, t, c or g
tgtaacatatataatatcgtatattctatatataatatatatacacacacatacacacatattcccaacacagagctggttgttaatatttaccagcacaccactgtcaagattgggctttctcttatccaggaactgagatccgctctggtggaaggatcccaggtggcctgggttcgggttcccaggttctatgtctgactcctccacttaactatctgtacgactctgggcaacttgcttagttagactctcaagtgttagtttcctcttctgttaaatgagagctagattgagtaatctgtaagattttctgctattaaaagctatnaccagccaggcgcattggctcactcctgtaatcccagcactttgggaggacgaggcaggcagatcacaaggtcaggagtttgagaccagcttgaacaacatggtgaaaccccatatctactaaaaatacaaaaattagctgggtgtgtgcctgtaatcccagctacccaggaggctgaggcaggaggattgcttgaacctgggaggtggaggttgcagtgagctgagattgcactactgcactccagcctgggtgacagagatagactccgtctccaaaaaaaaaaaaaaaaaaaaaaaaaaaaaaaaaaaaaaaatgactatagcattg

SEQ ID NO: 2897 - DNA, 661 bp, Homo sapiens
  misc_feature [331]..[331]: Chromosome 6, SNP identification no. = rs4706948
  misc_feature [331]..[331]: allele = g, in linkage disequilibrium with rs932614, respectively
  misc_feature [331]..[331]: n is a, t, c or g
tctccaaaaaaaaaaaaaaaaaaaaaaaaaaaaaaaaaaaaaaaatgactatagcattgtaaattccgtgaaatgaggggctgttttttatctttgcatttacataagcacgtaacatagttctttgcacactcaattaatgtctgtcaaattaagttgaatagcgtttttctcaaaatgttgtggattcttaaatataataatagctaatatttcctgccttactatgcaccagctgctttatctcatgtaattcttttaattctatgtggtagctacagttaccgattccgcttatacaaagtaattgagatttcctgagatgtcacanctaataaatggcaaactgagattccaacttggatctatctcacttcacagaaaccctcttaactactatgctacactactttttatccagaactaagatcttccctgaaatgctaatcatggagaatccttctgcatgccagaaagtgaaatgacaaataaatctttacatttattcattgcaaccctggaggtgctatcatctgtgtctcaaatttagtttgcagcaggatcatctgcagttctgaaatgcatattcctgagccccgccccccgacctattcaatcagaatctctaggggtggtgccacaaagccacatttttattttt

SEQ ID NO: 2898 - DNA, 661 bp, Homo sapiens
  misc_feature [331]..[331]: Chromosome 6, SNP identification no. = rs6454271
  misc_feature [331]..[331]: allele = a, in linkage disequilibrium with rs932614, respectively
  misc_feature [331]..[331]: n is a, t, c or g
attttttgagtcggaatctcactctgtggcccaggctggagtgcagtggcgtgatctcggctcattgcaacctccatctcctgggttcaagcaattctcctgcctcagcctcccaggtagctgggattacaggtgtgcaccaccacaccaggctaatttttttgtatttttagcagagatggggtttcaccatgttggccaggctggccaacaactgactcctgaggtgccctcggcctcccaaagtgctgggattacaggtgtgagccaccatacccagccaagaagctacatttttatctgaactatcattttgatatggggaaccctngaccacatttaagagaagcaccagccaagagcagggactttcaaacacttttaaccacaacctagagttaagaaaacattttatattgtgacccaccattcatatacatgtgcccacaaaaatgtgaacattctgatattttccaactctattccattccattgtactttttaaaactaatggtcaagtttcataaattgattttatttcccattagtgggtcacaatttgcagtttataaaatactgacttagaaaggttatatttgtaccatgtgccttcttttttcctgatttaagagtttgcacattagcgagacagaaagtccag

SEQ ID NO: 2899 - DNA, 661 bp, Homo sapiens
  misc_feature [331]..[331]: Chromosome 6, SNP identification no. = rs2875128
  misc_feature [331]..[331]: allele = c, c, in linkage disequilibrium with rs507500, rs932614, respectively
  misc_feature [331]..[331]: n is a, t, c or g
ctgactcctgaggtgccctcggcctcccaaagtgctgggattacaggtgtgagccaccatacccagccaagaagctacatttttatctgaactatcattttgatatggggaaccctggaccacatttaagagaagcaccagccaagagcagggactttcaaacacttttaaccacaacctagagttaagaaaacattttatattgtgacccaccattcatatacatgtgcccacaaaaatgtgaacattctgatattttccaactctattccattccattgtactttttaaaactaatggtcaagtttcataaattgattttatttcccantagtgggtcacaatttgcagtttataaaatactgacttagaaaggttatatttgtaccatgtgccttcttttttcctgatttaagagtttgcacattagcgagacagaaagtccagctgtcattcctgtatacctcagttagctcacctgattattccaggcagggctggatttactccttatcctctgttcccagaaagaaaaggatgaagttttttcccttgaaagggtttttgaaagtgtcatttaactagcgatttccgttagtcccaccactccaccaatacgagttatggcagctctgtgtcccattagtgagctctttcccct

SEQ ID NO: 2900 - DNA, 661 bp, Homo sapiens
  misc_feature [331]..[331]: Chromosome 6, SNP identification no. = rs6912008
  misc_feature [331]..[331]: allele = c, in linkage disequilibrium with rs932614, respectively
  misc_feature [331]..[331]: n is a, t, c or g
tttatattgtgacccaccattcatatacatgtgcccacaaaaatgtgaacattctgatattttccaactctattccattccattgtactttttaaaactaatggtcaagtttcataaattgattttatttcccattagtgggtcacaatttgcagtttataaaatactgacttagaaaggttatatttgtaccatgtgccttcttttttcctgatttaagagtttgcacattagcgagacagaaagtccagctgtcattcctgtatacctcagttagctcacctgattattccaggcagggctggatttactccttatcctctgttcccanaaagaaaaggatgaagttttttcccttgaaagggtttttgaaagtgtcatttaactagcgatttccgttagtcccaccactccaccaatacgagttatggcagctctgtgtcccattagtgagctctttccccttcagctctgtgggacaggctgcagggcccagatctctctgagcatctcctacctggcacagcacaggatttatttagcatttggcctagggtttgtcccactgtttcagagtttgctaccattactgtagtaggtatgaataatttttcaagtgtaagcttgtgacttctttttttgctcctgaaattattgatca

SEQ ID NO: 2901 - DNA, 661 bp, Homo sapiens
  misc_feature [331]..[331]: Chromosome 6, SNP identification no. = rs9449475
  misc_feature [331]..[331]: allele = c, c, in linkage disequilibrium with rs507500, rs932614, respectively
  misc_feature [331]..[331]: n is a, t, c or g
tgctgaaatgatctcacataccttcatcttagcaagtcctttagatttcatttgggaattaagatatgaaagctctttccagggttatttttatgggatgagtatgtaagctgaaaataggaaatatagtttggttaaggggagctacatttgggatgatcaagcacaaattcctaatttattttatgttagcaacagaaggctgtctttgtttttcttcctttcctctccttttattctttttttttttcatttattcagctacctatttgacacatatttattggagcctacagtgtaccaggcactggtgtaaaaatgcaataccaanatgtcctgatactcaggagactacaatctaatggtgagggagactctagttaatcaatgattataatattttaatgaaagaggtatctgagtcagggcagtcaggtaaagctgttccaagggggtgacactgagctaaatttcaaagggtgagtacaaggatgaagaagccaaagaaggaggtaatagagactttgtcttagtttgggtttccctgaattcagagcctgcaataaggacttagaggcaggtagttaatttacagcatgagccccagaaactggagtgagagagtgtgagacagagaaagaaaaacaaagtcaaagtagat

SEQ ID NO: 2902 - DNA, 661 bp, Homo sapiens
  misc_feature [331]..[331]: Chromosome 6, SNP identification no. = rs967730
  misc_feature [331]..[331]: allele = g, in linkage disequilibrium with rs932614, respectively
  misc_feature [331]..[331]: n is a, t, c or g
catatttattggagcctacagtgtaccaggcactggtgtaaaaatgcaataccaatatgtcctgatactcaggagactacaatctaatggtgagggagactctagttaatcaatgattataatattttaatgaaagaggtatctgagtcagggcagtcaggtaaagctgttccaagggggtgacactgagctaaatttcaaagggtgagtacaaggatgaagaagccaaagaaggaggtaatagagactttgtcttagtttgggtttccctgaattcagagcctgcaataaggacttagaggcaggtagttaatttacagcatgagccccngaaactggagtgagagagtgtgagacagagaaagaaaaacaaagtcaaagtagattgagctcattgccaactatggacaactgggacttaattccactggggacctctggaggaatgtaggtactatagaattatctctcctcccaaggacaagtggtgggggttctgtccgttgtctcctatctttattgggatacaggatgtgtgtgtgtgaaggctggggtggaggaaacatgaagaactgactggtttttctcattctttgtggctagtgacaaatggggtgcagttgagggggtttttaaaatcttgtattattttctaaatgtt

SEQ ID NO: 2903 - DNA, 661 bp, Homo sapiens
  misc_feature [331]..[331]: Chromosome 6, SNP identification no. = rs967731
  misc_feature [331]..[331]: allele = g, in linkage disequilibrium with rs932614, respectively
  misc_feature [331]..[331]: n is a, t, c or g
atcaatgattataatattttaatgaaagaggtatctgagtcagggcagtcaggtaaagctgttccaagggggtgacactgagctaaatttcaaagggtgagtacaaggatgaagaagccaaagaaggaggtaatagagactttgtcttagtttgggtttccctgaattcagagcctgcaataaggacttagaggcaggtagttaatttacagcatgagccccagaaactggagtgagagagtgtgagacagagaaagaaaaacaaagtcaaagtagattgagctcattgccaactatggacaactgggacttaattccactggggacctcnggaggaatgtaggtactatagaattatctctcctcccaaggacaagtggtgggggttctgtccgttgtctcctatctttattgggatacaggatgtgtgtgtgtgaaggctggggtggaggaaacatgaagaactgactggtttttctcattctttgtggctagtgacaaatggggtgcagttgagggggtttttaaaatcttgtattattttctaaatgttcttcatttcatgtgagttgaggcttacttaaattttcctcaatccagctcatgattccttgcaatttgaatagattatttccatagtctgatctcagtgttaagtgat

SEQ ID NO: 2904 - DNA, 661 bp, Homo sapiens
  misc_feature [331]..[331]: Chromosome 6, SNP identification no. = rs9361923
  misc_feature [331]..[331]: allele = a, in linkage disequilibrium with rs932614, respectively
  misc_feature [331]..[331]: n is a, t, c or g
acaccataaagaatagacatgcaagtattgtcatgtctgctctaaaagtagagctagtgaattacagattataattagaatgagagactaaatgatatttagggccatgtgcagggcttacttcttgaaatacatggctgccaaatgcttatggtcacattttaaatatttatttaaatccaaggggccaatcactttttatacccagtcttcaggaccacctgtcccaagctacagttagcatgctattaactactgttgtttccatgatcactaatagcatccatttctcttattgcacagtatttcaacatgattataggaacattcnaattttaaacttggaaagaacttctaaaattatatgtatggagtgcttttccatttcaaaatcagttaggtatatggaacactcacataaatgtttagtaactggttctctaggggaaaaagccctgatttaaaacttttgacagtctttgtggtgtaaatattcccaccatttcaagcttccaacgttacttcacggaatgtgccattgtttttgtagtatttctaccacacagatacatgtaaataaacttgacagcctaaataatagaaatatgtagtaaaataattaggaagtaatgaattttgaatatttgtagccgttgttttt

SEQ ID NO: 2905 - DNA, 661 bp, Homo sapiens
  misc_feature [331]..[331]: Chromosome 6, SNP identification no. = rs9452113
  misc_feature [331]..[331]: allele = a, in linkage disequilibrium with rs9452134, respectively
  misc_feature [331]..[331]: n is a, t, c or g
aataaggaatcaataagtatttgttaaattgtctatcatcctccatgtccaccagatatgctgtttattcttttattcttcatcaactatcactgcttttaagcacattgatagtatcaaagttactcttagcctattaacatttagggaaataaactaaaaataaaataatatggatgcattttaccataaaatatacatgtggcttttagttaaattattcaattatactttgtctttatttctgaatatttattcatacaaaaaaatgtttattaccgctcactggtttccagggatacaaaactagtgagttttgtagagaatcatntggaatcataaaccttggaatacttttttctctgtgacatttagcacaatttaaagatataaaattaatgatagaaaataggtttataaacataaatagtataaatatactaatatttcaaggaaaagtatgtttctaaaaacttactatagtgtgatttataccaaaaaatcatgacaattggatgtagaatttgatattatagtataacatttagatatgagttctcatatgtatgattgtaagagaagggaacaaaatgagcatacagtatcatgtacaacctgggttaggagatactgttagtaatttacataccctctaactatt

SEQ ID NO: 2906 - DNA, 661 bp, Homo sapiens
  misc_feature [331]..[331]: Chromosome 6, SNP identification no. = rs9452114
  misc_feature [331]..[331]: allele = a, in linkage disequilibrium with rs9452134, respectively
  misc_feature [331]..[331]: n is a, t, c or g
ttaaatatattgagttgagtccatcctgaattatttggtgggtccaaaactcaatgataagtgtctttataagagacacagtgagacacacagaaagaaaaagagaaggctgtatgaagatgaaggcagagattgaggttatgaagccatggaaacgaaggaactcctggagccaccaagaagctagaaaaggcaaggaggaatgctcccctagagtcttcagaagagaatacagctctgtcagaaaacagaatgaaaccctgtcactgaatggtgagagaacaaatttctactgttttaagccacctagtttgtggtgatttgttacagnagcaccccccagccccagcctaaatagtctcccaactctaatttacatgttcttttttgcagcagactcagcctttccaaagccagcactagcacctgcactaacgcttcccagtgtgaacacctgcactaactacctttctaatgccaatacatgcactactcaaattctctcctcacatcggggtaagcctgtttagtgaactaattcaaacaagcagtaaatggatataaatgcatggactggttcattaccatgtgctacgatttgaatttgtccagcaaaagtttatgtattgaaaacttgatacccaatgcaacagtgttggga

SEQ ID NO: 2907 - DNA, 661 bp, Homo sapiens
  misc_feature [331]..[331]: Chromosome 6, SNP identification no. = rs13213089
  misc_feature [331]..[331]: allele = a, in linkage disequilibrium with rs9452134, respectively
  misc_feature [331]..[331]: n is a, t, c or g
ctctacctagcattctccagcctgatgtttttgcaattactctgaaagttccctaaacctaacttgcacggagctctgtgtttaaacccacgtacccatcccagtctttcctggccattcaacacgtaacggattcaaatctttgctaattcattcacaagaatcaaaggccaggctggagagcagtgccttgagcaggagacatggcttctgtgttaagtgtttataatatttatattctattcaagtcaaaattttgtgctattgaaaatattatctcaagctacttctaattattctccaacaacagtgatgagtgtttactatttcnaatagattttttgtctgtccctcctaccatcaaataattcttaaactctctctataggaatgtttttctctttagaccatgtttctagtcagagtgaagcaaaaagtccttgtcatgtgtccaacatgattgctagctatgagaggtaaatagaataaaatgctaatcaaacttttaaaatcttcttctgtttccttgggacaattatttaaaaaataaacaattaatattttaacaatatagttattaataataacaataacacaatgtgagattaaatcattttaatttttctgcaggttagatgaaagatacatggtgctcatgtac

SEQ ID NO: 2908 - DNA, 661 bp, Homo sapiens
  misc_feature [331]..[331]: Chromosome 6, SNP identification no. = rs11962323
  misc_feature [331]..[331]: allele = c, in linkage disequilibrium with rs9452134, respectively
  misc_feature [331]..[331]: n is a, t, c or g
gctagctatgagaggtaaatagaataaaatgctaatcaaacttttaaaatcttcttctgtttccttgggacaattatttaaaaaataaacaattaatattttaacaatatagttattaataataacaataacacaatgtgagattaaatcattttaatttttctgcaggttagatgaaagatacatggtgctcatgtacagcaacatcagatattatttttggagtcacaatgtttttaaaaaatgacaactttacttttaaacttaaacataccccgatagatagatagatagacatgataagcagtctgagagtaagaaaacaatttcnaaatttgaatggatattatacatattatatttatttcccagaaatataaacaaatatatgcttatatggatattactataattatatatatatatataactgtatggatataaccataacatgtatttctataactatatggatataacctatataactatatggatataaccataattatatggatataactataaagaaaaaagatttgtttttcttatgtgaatcattaaaaaaattaaattgttctgtaattacaatttatctatgcttcagtgctcacagtttttaaattaaatatcgaatacttaagacaatttgtacataggt

SEQ ID NO: 2909 - DNA, 661 bp, Homo sapiens
  misc_feature [331]..[331]: Chromosome 6, SNP identification no. = rs11964555
  misc_feature [331]..[331]: allele = g, in linkage disequilibrium with rs9452134, respectively
  misc_feature [331]..[331]: n is a, t, c or g
atagaataaaatgctaatcaaacttttaaaatcttcttctgtttccttgggacaattatttaaaaaataaacaattaatattttaacaatatagttattaataataacaataacacaatgtgagattaaatcattttaatttttctgcaggttagatgaaagatacatggtgctcatgtacagcaacatcagatattatttttggagtcacaatgtttttaaaaaatgacaactttacttttaaacttaaacataccccgatagatagatagatagacatgataagcagtctgagagtaagaaaacaatttctaaatttgaatggatattntacatattatatttatttcccagaaatataaacaaatatatgcttatatggatattactataattatatatatatatataactgtatggatataaccataacatgtatttctataactatatggatataacctatataactatatggatataaccataattatatggatataactataaagaaaaaagatttgtttttcttatgtgaatcattaaaaaaattaaattgttctgtaattacaatttatctatgcttcagtgctcacagtttttaaattaaatatcgaatacttaagacaatttgtacataggtttcatggttttcaaccac

SEQ ID NO: 2910 - DNA, 661 bp, Homo sapiens
  misc_feature [331]..[331]: Chromosome 6, SNP identification no. = rs11970040
  misc_feature [331]..[331]: allele = a, in linkage disequilibrium with rs9452134, respectively
  misc_feature [331]..[331]: n is a, t, c or g
ttcttctgtttccttgggacaattatttaaaaaataaacaattaatattttaacaatatagttattaataataacaataacacaatgtgagattaaatcattttaatttttctgcaggttagatgaaagatacatggtgctcatgtacagcaacatcagatattatttttggagtcacaatgtttttaaaaaatgacaactttacttttaaacttaaacataccccgatagatagatagatagacatgataagcagtctgagagtaagaaaacaatttctaaatttgaatggatattatacatattatatttatttcccagaaatataaanaaatatatgcttatatggatattactataattatatatatatatataactgtatggatataaccataacatgtatttctataactatatggatataacctatataactatatggatataaccataattatatggatataactataaagaaaaaagatttgtttttcttatgtgaatcattaaaaaaattaaattgttctgtaattacaatttatctatgcttcagtgctcacagtttttaaattaaatatcgaatacttaagacaatttgtacataggtttcatggttttcaaccacgtctaatgaaagtttcagtctaaacaaaataaa

SEQ ID NO: 2911 - DNA, 661 bp, Homo sapiens
  misc_feature [331]..[331]: Chromosome 6, SNP identification no. = rs6899693
  misc_feature [331]..[331]: allele = a, in linkage disequilibrium with rs9452134, respectively
  misc_feature [331]..[331]: n is a, t, c or g
agctgggcatcgtggctggcacctgtagtcccagctatttgggaggctgaggcaggagaatcacttgaacctgggaggcagaggttgcagtgagccaagatcacgccactgcactctagcctgggtgacagagcgagggttcatctaaaataaataaataaataaacaattttttaaaagttgacccttgaaaataaaatcaacatacaattcaatgtttttcattatttcatgagcttattcattttctgatctttaagattcctgatagtaaagacaatgtttacttcacacacgtatatatatatgttttaaacagcagtacacattntaactcttgtcataagttgcttcaagtaaatgaaagccaataaatagaaagttgcagattaaagaaaataaaatactgacagtgttggcatgcttatgatgttctgctgagatttttaaatagaaaagtatgtgagaggtcatttaccttatcgtacaaaatcaggaacaagctagttgtagcagcagttcgaaacttttaaggaaatgctacttgtgcatatcaggtgtacagctgacattatttctattatcagagactaagcaaaactctgtgattgctgttaatactaaaatgttaaaaaaaaaaaaaaggtgaggtctttgtttc

SEQ ID NO: 2912 - DNA, 661 bp, Homo sapiens
  misc_feature [331]..[331]: Chromosome 6, SNP identification no. = rs10806462
  misc_feature [331]..[331]: allele = c, in linkage disequilibrium with rs9452134, respectively
  misc_feature [331]..[331]: n is a, t, c or g
tttaaggaaatgctacttgtgcatatcaggtgtacagctgacattatttctattatcagagactaagcaaaactctgtgattgctgttaatactaaaatgttaaaaaaaaaaaaaaggtgaggtctttgtttcatagttgctagtgttggcaaaaatgaaatgttacttccacagcataaaactgacagtttcttcaccttctaaaagtgcagactattattagcattttgtatataaaacaagtaaaatttgagagtctttcgaaaaatgtatgtctatagatggataagtatgtacataattgcaaattgtataaattgcataataggnaatacagatttttttctaattatttctaaataaatctttaattaatttatttatttctaaataaatctttctcatttatttctatgtgactgccttaaaagtgagtgaaagatttatacatatttcctttatccaacttttccattcctcttccatgttctcatctgagattataattcttccctaccctgaatggcaggtaccatattgcggaacaaaacatttcaggtgattctggccactgttctaatggaaaagtagaataaattcttattaatcctacaatcaaattataagtttgagtgcaactttgagatgtttgtaggaatt

SEQ ID NO: 2913 - DNA, 661 bp, Homo sapiens
  misc_feature [331]..[331]: Chromosome 6, SNP identification no. = rs9452121
  misc_feature [331]..[331]: allele = g, in linkage disequilibrium with rs9452134, respectively
  misc_feature [331]..[331]: n is a, t, c or g
tttctaaataaatctttctcatttatttctatgtgactgccttaaaagtgagtgaaagatttatacatatttcctttatccaacttttccattcctcttccatgttctcatctgagattataattcttccctaccctgaatggcaggtaccatattgcggaacaaaacatttcaggtgattctggccactgttctaatggaaaagtagaataaattcttattaatcctacaatcaaattataagtttgagtgcaactttgagatgtttgtaggaattgatttgaaccaagtcttcagaatctttctagttttatgcaaagcttacctaaantcttctgagtcgtgagaactttggtattaccccttacatacatcctttgtgactaaggtattcatccaggaaaaaaagtcctttcaagtcctagtcataggaggacagtcgttttctgaggattaaaatggaaatggaaacttaaaaggttggtattttcttagtggataccacatttaaaaatatgtttaacataatagtccaatttaaaggaaaatgctatcattatagacataagatagtagtcttttattcttaactatatactaatctccatgaatacaaagcaaggtatgttcaactactaaacctgaatattgcaatatttcc

SEQ ID NO: 2914 - DNA, 661 bp, Homo sapiens
  misc_feature [331]..[331]: Chromosome 6, SNP identification no. = rs9294536
  misc_feature [331]..[331]: allele = a, in linkage disequilibrium with rs9452134, respectively
  misc_feature [331]..[331]: n is a, t, c or g
gtcctagtcataggaggacagtcgttttctgaggattaaaatggaaatggaaacttaaaaggttggtattttcttagtggataccacatttaaaaatatgtttaacataatagtccaatttaaaggaaaatgctatcattatagacataagatagtagtcttttattcttaactatatactaatctccatgaatacaaagcaaggtatgttcaactactaaacctgaatattgcaatatttccatattaagctttattttctttagctttctcatatactaaaaggaccccataaggagttgagaaatttttaggattataacacaccctnagaaacagtctgaatacatatactttagtaaatatatagaatcacaaaatgcaactacctctcaaaatttattttaaatctataaataaatcaccatttctattacagcccactgaaaagacaaagaaaaaaagtttagtttctctgctgaatttcctttctcattacaaggtcaacagatgtaggtgggaagctattttggcttttcagtttcctgattgctctagatagatcaactattcaccttcatgttagtgacttcattacattctgatatagaaactaatttgaaaaaggctgacctttaaaatactgaaggtgacaagaggg

SEQ ID NO: 2915 - DNA, 661 bp, Homo sapiens
  misc_feature [331]..[331]: Chromosome 6, SNP identification no. = rs1515788
  misc_feature [331]..[331]: allele = c, in linkage disequilibrium with rs9452134, respectively
  misc_feature [331]..[331]: n is a, t, c or g
ggattaaaaagctaaattgtgagaggtgaatagctcataaggtagcttttaaaacaaatatgatttgagatctgctcagttgtatcttcttcacctccttcgtttaccctcttgtcaccttcagtattttaaaggtcagcctttttcaaattagtttctatatcagaatgtaatgaagtcactaacatgaaggtgaatagttgatctatctagagcaatcaggaaactgaaaagccaaaatagcttcccacctacatctgttgaccttgtaatgagaaaggaaattcagcagagaaactaaactttttttctttgtcttttcagtgggctntaatagaaatggtgatttatttatagatttaaaataaattttgagaggtagttgcattttgtgattctatatatttactaaagtatatgtattcagactgtttctgagggtgtgttataatcctaaaaatttctcaactccttatggggtccttttagtatatgagaaagctaaagaaaataaagcttaatatggaaatattgcaatattcaggtttagtagttgaacataccttgctttgtattcatggagattagtatatagttaagaataaaagactactatcttatgtctataatgatagcattttcctttaaattggactattat

SEQ ID NO: 2916 - DNA, 661 bp, Homo sapiens
  misc_feature [331]..[331]: Chromosome 6, SNP identification no. = rs9294537
  misc_feature [331]..[331]: allele = g, in linkage disequilibrium with rs9452134, respectively
  misc_feature [331]..[331]: n is a, t, c or g
acagtctgaatacatatactttagtaaatatatagaatcacaaaatgcaactacctctcaaaatttattttaaatctataaataaatcaccatttctattacagcccactgaaaagacaaagaaaaaaagtttagtttctctgctgaatttcctttctcattacaaggtcaacagatgtaggtgggaagctattttggcttttcagtttcctgattgctctagatagatcaactattcaccttcatgttagtgacttcattacattctgatatagaaactaatttgaaaaaggctgacctttaaaatactgaaggtgacaagagggtaaangaaggaggtgaagaagatacaactgagcagatctcaaatcatatttgttttaaaagctaccttatgagctattcacctctcacaatttagctttttaatccaaattttaacttcaaagtagcccctgctgactcaaaagtgttataccacgcagtggccaggtgggggagaagtgcagccttattcctttgaagcttggctgcccaagatcaataggagttcacaggtggccatacttcaaaggggaagcactatgtctctgtttcggtccagcccctgtaacagttattttcgccccctccagtggcttggaattggctttcatgttat

SEQ ID NO: 2917 - DNA, 661 bp, Homo sapiens
  misc_feature [331]..[331]: Chromosome 6, SNP identification no. = rs1399941
  misc_feature [331]..[331]: allele = t, in linkage disequilibrium with rs9452134, respectively
  misc_feature [331]..[331]: n is a, t, c or g
tctaactacactgtagaatagatatccagctacaaaatgttgaataaaatttacctacaaccattgtagcttgttgaagagatttagcttagttgctaaaatgtcagatgcaaccctgtaagtgggttgcttttaaaaatctcccctgcaggcttacctttccttctacccagcaattgcattaataggtgcttttaaaaggtagctggtcctctcaagatgttggcttcttttaaaattcttttaatcaagatctgcctctaatgctcttcatttactttcttaagtgaaaatataacatgaaagccaattccaagccactggagggggngaaaataactgttacaggggctggaccgaaacagagacatagtgcttcccctttgaagtatggccacctgtgaactcctattgatcttgggcagccaagcttcaaaggaataaggctgcacttctcccccacctggccactgcgtggtataacacttttgagtcagcaggggctactttgaagttaaaatttggattaaaaagctaaattgtgagaggtgaatagctcataaggtagcttttaaaacaaatatgatttgagatctgctcagttgtatcttcttcacctccttcgtttaccctcttgtcaccttcagtattttaaaggtca

SEQ ID NO: 2918 - DNA, 661 bp, Homo sapiens
  misc_feature [331]..[331]: Chromosome 6, SNP identification no. = rs6902337
  misc_feature [331]..[331]: allele = g, in linkage disequilibrium with rs9452134, respectively
  misc_feature [331]..[331]: n is a, t, c or g
tggctgcccaagatcaataggagttcacaggtggccatacttcaaaggggaagcactatgtctctgtttcggtccagcccctgtaacagttattttcgccccctccagtggcttggaattggctttcatgttatattttcacttaagaaagtaaatgaagagcattagaggcagatcttgattaaaagaattttaaaagaagccaacatcttgagaggaccagctaccttttaaaagcacctattaatgcaattgctgggtagaaggaaaggtaagcctgcaggggagatttttaaaagcaacccacttacagggttgcatctgacatttnagcaactaagctaaatctcttcaacaagctacaatggttgtaggtaaattttattcaacattttgtagctggatatctattctacagtgtagttagaatgaaaaacatgcccacagctgccaagttcaggtgaaaagaactcacttatattacttgaaaaatagcaatgattaagttactcgttaaacatatttctacacaatcaatgcacaagaatgtaattcctgagtacatttccatgtaatgtttgccgaaatatatttttattaatttttattttattttatatactatgtaatatatattttacatactttttataaacaagaa

SEQ ID NO: 2919 - DNA, 661 bp, Homo sapiens
  misc_feature [331]..[331]: Chromosome 6, SNP identification no. = rs6922656
  misc_feature [331]..[331]: allele = c, in linkage disequilibrium with rs9452134, respectively
  misc_feature [331]..[331]: n is a, t, c or g
aagagcattagaggcagatcttgattaaaagaattttaaaagaagccaacatcttgagaggaccagctaccttttaaaagcacctattaatgcaattgctgggtagaaggaaaggtaagcctgcaggggagatttttaaaagcaacccacttacagggttgcatctgacattttagcaactaagctaaatctcttcaacaagctacaatggttgtaggtaaattttattcaacattttgtagctggatatctattctacagtgtagttagaatgaaaaacatgcccacagctgccaagttcaggtgaaaagaactcacttatattacttgnaaaatagcaatgattaagttactcgttaaacatatttctacacaatcaatgcacaagaatgtaattcctgagtacatttccatgtaatgtttgccgaaatatatttttattaatttttattttattttatatactatgtaatatatattttacatactttttataaacaagaatatgaaataatggatagtgtttctgttatcacagataaataaatcatacaaatcacaatcatttttgtaaataaaaaccagaggaattcctataatcaagaaaaatggttctgcatgttagccacatattgaaatcacctggcatatttttaaaaca

SEQ ID NO: 2920 - DNA, 661 bp, Homo sapiens
  misc_feature [331]..[331]: Chromosome 6, SNP identification no. = rs6922978
  misc_feature [331]..[331]: allele = t, in linkage disequilibrium with rs9452134, respectively
  misc_feature [331]..[331]: n is a, t, c or g
ttgctgggtagaaggaaaggtaagcctgcaggggagatttttaaaagcaacccacttacagggttgcatctgacattttagcaactaagctaaatctcttcaacaagctacaatggttgtaggtaaattttattcaacattttgtagctggatatctattctacagtgtagttagaatgaaaaacatgcccacagctgccaagttcaggtgaaaagaactcacttatattacttgaaaaatagcaatgattaagttactcgttaaacatatttctacacaatcaatgcacaagaatgtaattcctgagtacatttccatgtaatgtttgcngaaatatatttttattaatttttattttattttatatactatgtaatatatattttacatactttttataaacaagaatatgaaataatggatagtgtttctgttatcacagataaataaatcatacaaatcacaatcatttttgtaaataaaaaccagaggaattcctataatcaagaaaaatggttctgcatgttagccacatattgaaatcacctggcatatttttaaaacactaccaggaccccatctggagattttaatttaattggtttagaatgggcctgggcataggaatttgaaaagttcctcaggtgattttcatgtgca

SEQ ID NO: 2921 - DNA, 661 bp, Homo sapiens
  misc_feature [331]..[331]: Chromosome 6, SNP identification no. = rs9452123
  misc_feature [331]..[331]: allele = t, in linkage disequilibrium with rs9452134, respectively
  misc_feature [331]..[331]: n is a, t, c or g
tattttattttatatactatgtaatatatattttacatactttttataaacaagaatatgaaataatggatagtgtttctgttatcacagataaataaatcatacaaatcacaatcatttttgtaaataaaaaccagaggaattcctataatcaagaaaaatggttctgcatgttagccacatattgaaatcacctggcatatttttaaaacactaccaggaccccatctggagattttaatttaattggtttagaatgggcctgggcataggaatttgaaaagttcctcaggtgattttcatgtgcaccaagagtcagaaatgctgaccnagagcacagcttctcaaactctaatgtgtatataaccacctggggaccttgttaaactgcagttctagttcagtaggtccagggtaaggcctgagattctgcatttctaacaggctcccaggtgatgctgagctgctggtccccagagcactcattgtggaacaagaatttatgattcttagctcaggaaaaggacagacattgggatcattaaggcgtttgagttgaaactacctatagtctcctaaccccaatctaaacagatacccagtgccccaactccgagtgccagtatatttcacctttcagaggaaacttgttgctgaaggt

SEQ ID NO: 2922 - DNA, 661 bp, Homo sapiens
  misc_feature [331]..[331]: Chromosome 6, SNP identification no. = rs9445023
  misc_feature [331]..[331]: allele = t, in linkage disequilibrium with rs9452134, respectively
  misc_feature [331]..[331]: n is a, t, c or g
cagggtaaggcctgagattctgcatttctaacaggctcccaggtgatgctgagctgctggtccccagagcactcattgtggaacaagaatttatgattcttagctcaggaaaaggacagacattgggatcattaaggcgtttgagttgaaactacctatagtctcctaaccccaatctaaacagatacccagtgccccaactccgagtgccagtatatttcacctttcagaggaaacttgttgctgaaggtcattaaatctggtttctggcacaatcactagaaggctgcaatgagcctttaaaatatacagtcactaatataagttgcanactggtatatttcataggaagaacctgcttacaacaggcattttttaaaaaaaaaagcagctctgcattgttaagcttctaccgtatgtattgagcttgatgccagcaagaatgctaagtggggcctttactctgattggacatattcatgacatttgtccaaagaaaagataagctgagtgaaagaaccaaaggaaacacctggttatccacattggcggagataggcagttctgcatgcacaggagggatattttaccctgaattggagtgtacacatcctgagtgacctctgtgggacccaggctgctagctgtgcaggatggtcta

SEQ ID NO: 2923 - DNA, 661 bp, Homo sapiens
  misc_feature [331]..[331]: Chromosome 6, SNP identification no. = rs9294538
  misc_feature [331]..[331]: allele = t, in linkage disequilibrium with rs9452134, respectively
  misc_feature [331]..[331]: n is a, t, c or g
gaacctgcttacaacaggcattttttaaaaaaaaaagcagctctgcattgttaagcttctaccgtatgtattgagcttgatgccagcaagaatgctaagtggggcctttactctgattggacatattcatgacatttgtccaaagaaaagataagctgagtgaaagaaccaaaggaaacacctggttatccacattggcggagataggcagttctgcatgcacaggagggatattttaccctgaattggagtgtacacatcctgagtgacctctgtgggacccaggctgctagctgtgcaggatggtctaccttgctatgaaagttttaanttcctgacactgggcttcaaacacacctttgaatatatctccctttagcaatagatcttttaaataaaccaaagtatgtgtcaagtacaagcaaaaattctatacattatccttcaaaccttcttgtgttctatgacaatgtgatgtttttagaaaactcttggatttttgaatatgaaagacacaaaattgaatgtgggctctgatataatttaagtatttgggcataaactttctaagcctcctggttatctctttattgaagatctttcttacctctagtatcttggctacctgggagcctcagtcttgggttttgaaattgtagca

SEQ ID NO: 2924 - DNA, 661 bp, Homo sapiens
  misc_feature [331]..[331]: Chromosome 6, SNP identification no. = rs9452124
  misc_feature [331]..[331]: allele = g, in linkage disequilibrium with rs9452134, respectively
  misc_feature [331]..[331]: n is a, t, c or g
tatccacattggcggagataggcagttctgcatgcacaggagggatattttaccctgaattggagtgtacacatcctgagtgacctctgtgggacccaggctgctagctgtgcaggatggtctaccttgctatgaaagttttaagttcctgacactgggcttcaaacacacctttgaatatatctccctttagcaatagatcttttaaataaaccaaagtatgtgtcaagtacaagcaaaaattctatacattatccttcaaaccttcttgtgttctatgacaatgtgatgtttttagaaaactcttggatttttgaatatgaaagacacnaaattgaatgtgggctctgatataatttaagtatttgggcataaactttctaagcctcctggttatctctttattgaagatctttcttacctctagtatcttggctacctgggagcctcagtcttgggttttgaaattgtagcattcctaattaatgaagccactgtttttcaaagctcaaacaatgcactgggttaactgagtctaggaaagctttcaacacccaccacaaatcatgacatcaacacgtagacccgtccgttgaataagtcagtagacttatttcctttgatttaggtacctcttcttccctgccatgtagccttgctt

SEQ ID NO: 2925 - DNA, 661 bp, Homo sapiens
  misc_feature [331]..[331]: Chromosome 6, SNP identification no. = rs9452125
  misc_feature [331]..[331]: allele = g, in linkage disequilibrium with rs9452134, respectively
  misc_feature [331]..[331]: n is a, t, c or g
agtgacctctgtgggacccaggctgctagctgtgcaggatggtctaccttgctatgaaagttttaagttcctgacactgggcttcaaacacacctttgaatatatctccctttagcaatagatcttttaaataaaccaaagtatgtgtcaagtacaagcaaaaattctatacattatccttcaaaccttcttgtgttctatgacaatgtgatgtttttagaaaactcttggatttttgaatatgaaagacacaaaattgaatgtgggctctgatataatttaagtatttgggcataaactttctaagcctcctggttatctctttattgangatctttcttacctctagtatcttggctacctgggagcctcagtcttgggttttgaaattgtagcattcctaattaatgaagccactgtttttcaaagctcaaacaatgcactgggttaactgagtctaggaaagctttcaacacccaccacaaatcatgacatcaacacgtagacccgtccgttgaataagtcagtagacttatttcctttgatttaggtacctcttcttccctgccatgtagccttgctttgggcaactctaatcctccctgaccagtcatccttactctgagtcctggagaaaagatttggattttattcccttccg

SEQ ID NO: 2926 - DNA, 661 bp, Homo sapiens
  misc_feature [331]..[331]: Chromosome 6, SNP identification no. = rs13215884
  misc_feature [331]..[331]: allele = c, in linkage disequilibrium with rs9452134, respectively
  misc_feature [331]..[331]: n is a, t, c or g
attaatgaagccactgtttttcaaagctcaaacaatgcactgggttaactgagtctaggaaagctttcaacacccaccacaaatcatgacatcaacacgtagacccgtccgttgaataagtcagtagacttatttcctttgatttaggtacctcttcttccctgccatgtagccttgctttgggcaactctaatcctccctgaccagtcatccttactctgagtcctggagaaaagatttggattttattcccttccgagaaacctgaagaaatagtatgcaaattgacccaactgctacctagatctgaatgagaaaaattaagagagcnacagctaacaaacaccaagaaatatgttttattgtatcttgccccttggcagcatcttacttatggttccttcatcacttaactacttgctcacctgcgaagtgccagacaaccttccagaaactgagaatttagaagttaaaaaaaatagacaatgcccttgttcttgaactgcatattccctagattagggtgaaaaataacataagaatgacaactatattttacttttattttcagataagtttacttttattttcagagatgctcatagctatggaggggttataagaagtagcatgatctaatttgtctttaaaaagattatgt

SEQ ID NO: 2927 - DNA, 661 bp, Homo sapiens
  misc_feature [331]..[331]: Chromosome 6, SNP identification no. = rs9452127
  misc_feature [331]..[331]: allele = a, in linkage disequilibrium with rs9452134, respectively
  misc_feature [331]..[331]: n is a, t, c or g
gaatctgaatgaaagatgatggcacatggatatgtcagaggcatcatggaagacctgctcaaacaaagtacataatgaatgctaacagttactatcatagtccaaggaagaactctgtggtccctctgtgatgctctcgtcaggctgtgttggagaccatggccaccactgctcccttgtgtctgactagcttgttgaggttcttactttcccaaataacaggaagcattttcccaactaaaaccagatttttagaattaaaatattatttctggaaatgtgttttaggcaatacattactcaatctcattatttgatactaacggcaacnttttaaagattctgatattaacataaattaggaagtttaaatacataaaatcttcattttcccattatttgtccttagatataaagttaatgatatttgtgaataaaaggggtaatagacaaattacactatctcctcaattctaagataatttattttttattttattttatttcattttatttttgagacaaggcctcagtcttttctcccaggctggagtgcagtggcatgatcttagcttactatagcctctgtctcccaggtcaagaaagtctctcgcctcagcctcccaagtagcggaaactacaggcacgtgccaccatgcct

SEQ ID NO: 2928 - DNA, 661 bp, Homo sapiens
  misc_feature [331]..[331]: Chromosome 6, SNP identification no. = rs13205868
  misc_feature [331]..[331]: allele = c, in linkage disequilibrium with rs9452134, respectively
  misc_feature [331]..[331]: n is a, t, c or g
atttttgagacaaggcctcagtcttttctcccaggctggagtgcagtggcatgatcttagcttactatagcctctgtctcccaggtcaagaaagtctctcgcctcagcctcccaagtagcggaaactacaggcacgtgccaccatgcctgactaattttttgtagtttttgtagaaacgggtttctgccatgttggtcaggctggtctcgaactcctggactcaagtgatccacccaccttggcctcccaggggtctgggattgcaggcatgagccaccacacccagtcataaaatcacatcttaaagtatttggaattggaaaccctctnagaattgatgtgcacaattaatgggatagggttctttttttctgaaaaattattattaaataagcagtgtacccttcgattaatgcttttttaggatcgtgcaataaaaatgttttaaaataatacataaataagaaaaaatcacttataatatcaaaacataaatgactaaaccccgtctctactaaaaatacaaaaaaaattagccgggcgtgatggtgggcgcctgtagtcccagctactcgggaggctgaggcaggagaatggcgtgaaccctggaggcggagcttgcagtgagccgagattgcgccactgcactcccgcctgggc

SEQ ID NO: 2929 - DNA, 661 bp, Homo sapiens
  misc_feature [331]..[331]: Chromosome 6, SNP identification no. = rs13193833
  misc_feature [331]..[331]: allele = a, in linkage disequilibrium with rs9452134, respectively
  misc_feature [331]..[331]: n is a, t, c or g
ccgggcgtgatggtgggcgcctgtagtcccagctactcgggaggctgaggcaggagaatggcgtgaaccctggaggcggagcttgcagtgagccgagattgcgccactgcactcccgcctgggccacagagcgagactccgtctcaaaaaaaaaaaaaaaaaaaaaaacataaatgactagaaaatgagacagctttttcaacaacagtaaggcattattgaaaataatttttcattttgcaacatacaatgaatgtagaacataaaagttatgtattatagaaattcacaatttcaaaacatattgctataatgaaagttctctaatacngtgaaaaggcttatttctcatataatatagggagaaaaaattctggtattcaatttaaactatgaccccaataaaggaatcactaagagagaatgttgtcccaatttagtaagacaataaagagaatgagtgccacaaaatattgaaatagtatgattaatctctaagaaagagatttagaggtactataccctctcattgctcagatttcttttgtcctataactcatgaatacatactttatctaaactgttagcatattctttaaggtaatctttaagagctaagaggtaatccttaagagttaacagaatcaagcaaattaaaaag

SEQ ID NO: 2930 - DNA, 661 bp, Homo sapiens
  misc_feature [331]..[331]: Chromosome 6, SNP identification no. = rs13202541
  misc_feature [331]..[331]: allele = a, in linkage disequilibrium with rs9452134, respectively
  misc_feature [331]..[331]: n is a, t, c or g
gaatacttatcaccaattctttttaaggcaaataggtaccgctagttaaatttattgagtaacttctaatatttaaaaacacttaaattagctagcaatatatatgatatctggaggcagagagcgccttctaacaaaatgacttaaattgtatgtggtaataaagagcagttcttgctcctcacattcaatgtttcagccatgcacaggaataatgaaaattattccactagcttcagtggttgaaaaataatgatacctctttctatctatatgaagcactgaataatattcagaaagtttgcttctatactcattctttccacctganagactttgcacattgttgctcttcatttcccttctcaatcctgcagtataatgtaaacaatcaattcattacatatattttgtattgagattttcattctttacgtccatagtgtgttttgtaatccactgtaggaagcaaaagtaaatgacctttcctgccattatttttattccaggtttgagttatttatttgagttttcctagagataactaagatagattcaagaggtgtagactagaatgctgattcctaagataatggccttccggttttaactcagccagtaaagcctgttttcccctccaaaacagtgggcttccttagag

SEQ ID NO: 2931 - DNA, 661 bp, Homo sapiens
  misc_feature [331]..[331]: Chromosome 6, SNP identification no. = rs13203186
  misc_feature [331]..[331]: allele = t, in linkage disequilibrium with rs9452134, respectively
  misc_feature [331]..[331]: n is a, t, c or g
agagaaaataattgggctcattccctatacagaactaggtaagcacacaatggagaaccttttggcatagtgtatccctgttagtagagatgccaacagaagcattaaggggtcgagtacagaaagaaaaagataataagtgaataaatgaagtgagcaaagttacaagctatagtggaaactgtaggggggaaaaagccatttatagatagaatagaaaattatatagctaaacacagaatctttcttagagtcttcttgatctcactccactcatccaagaattagaaaggtattcatcttcagatcatatcccaaatgcaattctttncatttcctccaaaccacctgtgcataaatcattattatctcctgttgtctagcggccgttcttccaccctgacttcctggagaagccccatccaacaccatcccccaacaaatgatctacacaggagccagttgtcttaaactaactggatcttctcactctccctgcattaagccttttcacaactaccagtgttagttagaataaaatctaccttttttcccagttttgcaatctcagtgtttatctgttcccatattcctctgtcttcatctcacacccgtcttccctcatttcttaaattccagcaataatgacctttcttctatt

SEQ ID NO: 2932 - DNA, 661 bp, Homo sapiens
  misc_feature [331]..[331]: Chromosome 6, SNP identification no. = rs9452134
  misc_feature [331]..[331]: allele = c, t
  misc_feature [331]..[331]: n is a, t, c or g
tgcatctctgcctttttgaatcatggtcaatgcttttgctcataaagaaccactccatttccggttgctcaatgccagattgttcccgctgctattgtctcccagcaggccaaagctatgtagcatcatttaacacagaggggtttgtcgacattgtcagtcctccatatttatgaagcattgcattcgtggagatgaaatatagccaaattcatgtcgtttccaggctgccttttccataactgtcatttatttggcttgaaatgggtaatgcttgctttccagggagcaaatctagccttctttcagaatgacgtttggaaagggattnacattctcacactaagcagacttcttgttctaagagtagcaaaaatcagcaagaattacaagaaagaaaaagaggggaaaagatactgaaaaattcagaaacgtttttgtatctttcaaaactcagtgggattgaaacctttaaacactagcaaatatgtatgacattttctgtattcaagatcaatttaaaaaataataatacctgctttagtgcataaatatattaccaattcagttctgcaaaatgttatgacactcagatgcacatatggtttatacaacgtggaattcaagaacaacctgcatgtgatagagggactgtacaaaa

SEQ ID NO: 2933 - DNA, 661 bp, Homo sapiens
  misc_feature [331]..[331]: Chromosome 6, SNP identification no. = rs9445025
  misc_feature [331]..[331]: allele = c, in linkage disequilibrium with rs9452134, respectively
  misc_feature [331]..[331]: n is a, t, c or g
tttccggttgctcaatgccagattgttcccgctgctattgtctcccagcaggccaaagctatgtagcatcatttaacacagaggggtttgtcgacattgtcagtcctccatatttatgaagcattgcattcgtggagatgaaatatagccaaattcatgtcgtttccaggctgccttttccataactgtcatttatttggcttgaaatgggtaatgcttgctttccagggagcaaatctagccttctttcagaatgacgtttggaaagggatttacattctcacactaagcagacttcttgttctaagagtagcaaaaatcagcaagaatnacaagaaagaaaaagaggggaaaagatactgaaaaattcagaaacgtttttgtatctttcaaaactcagtgggattgaaacctttaaacactagcaaatatgtatgacattttctgtattcaagatcaatttaaaaaataataatacctgctttagtgcataaatatattaccaattcagttctgcaaaatgttatgacactcagatgcacatatggtttatacaacgtggaattcaagaacaacctgcatgtgatagagggactgtacaaaattataagaaatacaataaaaagatgtaaattgagcagcctaaaagaggagcattaaa

SEQ ID NO: 2934 - DNA, 661 bp, Homo sapiens
  misc_feature [331]..[331]: Chromosome 6, SNP identification no. = rs9452135
  misc_feature [331]..[331]: allele = c, in linkage disequilibrium with rs9452134, respectively
  misc_feature [331]..[331]: n is a, t, c or g
gggatttacattctcacactaagcagacttcttgttctaagagtagcaaaaatcagcaagaattacaagaaagaaaaagaggggaaaagatactgaaaaattcagaaacgtttttgtatctttcaaaactcagtgggattgaaacctttaaacactagcaaatatgtatgacattttctgtattcaagatcaatttaaaaaataataatacctgctttagtgcataaatatattaccaattcagttctgcaaaatgttatgacactcagatgcacatatggtttatacaacgtggaattcaagaacaacctgcatgtgatagagggactgnacaaaattataagaaatacaataaaaagatgtaaattgagcagcctaaaagaggagcattaaaggtattaaaaatctttaccaattagtaattcctgacagtacattctaagtaagttaactgtcacagagaaaatctgtatcttcagataagattctaagaatgttaaatcataataaaacccatgaacagttgtagggacaaaacacacagttgacagctttctgttttgggctgatcaggagtaaaagtaacaaaaagctcacaaccatgactttatgaatcaaacccgattaaccattgtttcaaaatattcctttttaaattttt

SEQ ID NO: 2935 - DNA, 661 bp, Homo sapiens
  misc_feature [331]..[331]: Chromosome 6, SNP identification no. = rs9445026
  misc_feature [331]..[331]: allele = c, in linkage disequilibrium with rs9452134, respectively
  misc_feature [331]..[331]: n is a, t, c or g
aggatatggtattattaatacttaatggactttttcattgacttcataagaaaacatagtattgcagtttgtgtttgaagtacgccatatcatttagggaaagaaaataaaaagttggtttatgtcattttataaagaaaattccaccatttcaaacagccttttaatctaaattaagctagaattaaactatttgaggagtgatttgcttgttccatagataatacttgggtactattttattgttctagtgtaatttttctttgagatattctactttttattctacaacatcgaggttgctttggtcaggggaaaaaggctaaaaacntacagatgacgtacgataataagaatgcaaacattataggaacattaatcatgtaaatagttcagcaaatatctgtaccctcacagctcatttgttctttttgctgtgttttatatcactgtattatgataaactatggtttcacatcaatcatctgcaattggattatagctgtactgcaatttgcttaattggtatcaaagcaaaaattatgctgtactggacaggttgttaacaaaatgtaacaaagggagaaaaatgtcgtctctagcaaatctgaacatcacattataatgctattcctatgaaggcaagtggattggttttaaa

SEQ ID NO: 2936 - DNA, 661 bp, Homo sapiens
  misc_feature [331]..[331]: Chromosome 6, SNP identification no. = rs9452138
  misc_feature [331]..[331]: allele = c, in linkage disequilibrium with rs9452134, respectively
  misc_feature [331]..[331]: n is a, t, c or g
atacttaatggactttttcattgacttcataagaaaacatagtattgcagtttgtgtttgaagtacgccatatcatttagggaaagaaaataaaaagttggtttatgtcattttataaagaaaattccaccatttcaaacagccttttaatctaaattaagctagaattaaactatttgaggagtgatttgcttgttccatagataatacttgggtactattttattgttctagtgtaatttttctttgagatattctactttttattctacaacatcgaggttgctttggtcaggggaaaaaggctaaaaacatacagatgacgtacganaataagaatgcaaacattataggaacattaatcatgtaaatagttcagcaaatatctgtaccctcacagctcatttgttctttttgctgtgttttatatcactgtattatgataaactatggtttcacatcaatcatctgcaattggattatagctgtactgcaatttgcttaattggtatcaaagcaaaaattatgctgtactggacaggttgttaacaaaatgtaacaaagggagaaaaatgtcgtctctagcaaatctgaacatcacattataatgctattcctatgaaggcaagtggattggttttaaatgtcatgatgaataatt

SEQ ID NO: 2937 - DNA, 661 bp, Homo sapiens
  misc_feature [331]..[331]: Chromosome 6, SNP identification no. = rs6454913
  misc_feature [331]..[331]: allele = a, in linkage disequilibrium with rs9452134, respectively
  misc_feature [331]..[331]: n is a, t, c or g
aatattaaatttttatttcctgaccaaattgattctaataagactaaaacttctatgctattgtaaaacttgctattataatctgcttaaatttttaaggatttttatccatcctttgatcctacagtcttaaggctatatgtcttcatggacataattaaaaatttaccaaaaataaattaattttgaataatatctgttcaatatgacaacacttgaagctaagattcaatgttactgtaccatattctttatagagatatagaattcaaactgacacatattaagctggaattaaaagtttacacacacacacactcacacacttgancattataccaaatgattatacttagctatttattcacctcaggttataatatcttcatgctaaccagcattaaattccccacccctaaatagtccactgaattttaagtgacagaaatactttacaggcataattacaaagtaaaaagagatggttatgagcaaacatagaactcattttttcaaaacactgttgaactatgcaattgtaggtgttttttaactagtcaaaataattcaccaccatgccttaattcctactctacactctctttgccattgctgctgtaacccagggtcctggggttttggggtgtacactctgaaaaag

SEQ ID NO: 2938 - DNA, 661 bp, Homo sapiens
  misc_feature [331]..[331]: Chromosome 6, SNP identification no. = rs1554155
  misc_feature [331]..[331]: allele = a, in linkage disequilibrium with rs9452134, respectively
  misc_feature [331]..[331]: n is a, t, c or g
acagtccagagaagaagagagcttctgggcacgtacctctgctttagaaatgatttcgactcatattcttccatgagcaaagaagcaacctgataggtcatgtagaaagagttgaaaaggctgtagaagagatgggctgtgtgagtagcagtgcatgggtggcagtgaatgcttggtaatgacaaagaagctggtcaattttagtcaagttagaaccctcaaaagagatacgcttatcgcccttgcttctttacaaattctacaaaccctaaaaacttttttccttttccaggagcagcagcatcagtagcagttgggtttgctcccactncagacatgctgaatcagaaattttgaggttgaggtccagcaacgtgttttaacaagccctctaggcgatgctgatgcactctcatgtttgaaacactacatactagatgacaagtttaatgttgaggtctattttttactgtgtttgatatatttttgaaaattgattatgggaaaagtattagaagaactcatttaggcctggagctgctgttggaactgattgctatgtatggaaactccagcagagcagcctttgaaaaacagattgataacaattaactctaagcaccagtgattaaccttaagtagcctaggctgctccccaagg

SEQ ID NO: 2939 - DNA, 661 bp, Homo sapiens
  misc_feature [331]..[331]: Chromosome 6, SNP identification no. = rs7741495
  misc_feature [331]..[331]: allele = g, in linkage disequilibrium with rs9452134, respectively
  misc_feature [331]..[331]: n is a, t, c or g
ctgagtcacattataaatctctctcttctattagctcagcctggaaaaatcctaacctggaggagggaaaggggttatcaccaccacctaccctccccaccttagtctgaaatttcccttgactctcagaagaggtcaaagcagcactgatacaagctctgtgttcctcccagggtatgtgcaaatacgaacttattaattctgtcctcatttttgttgagctgtaaaaactacttaatatatggctttgttttcttattcaatgattcaattatcttgcctagtgtagatcactagaagtggatgtcatttcatccattttcccagcacngagtaatgggcagagggtcctgagtatcaggacctctgaataaatggctgatgttctttcctaaaaagctattgagactggctcagacagtcagactttcacaaatctgagactgggagaaagtgcttgctttgcagaagccagtagaagcatgggactatatagtgatctcagcaaaggtgccaacatcagtaagccaggacaagaagctgtgtagagaggagggctgggtaaagctctcagtacccagagtaccgtggcagttaatctgaaggccacagaagtataatcatgggtttagtgggcaagtgagccaatagttcagagcaa

SEQ ID NO: 2940 - DNA, 661 bp, Homo sapiens
  misc_feature [331]..[331]: Chromosome 6, SNP identification no. = rs9359995
  misc_feature [331]..[331]: allele = a, in linkage disequilibrium with rs9452134, respectively
  misc_feature [331]..[331]: n is a, t, c or g
tgagactggctcagacagtcagactttcacaaatctgagactgggagaaagtgcttgctttgcagaagccagtagaagcatgggactatatagtgatctcagcaaaggtgccaacatcagtaagccaggacaagaagctgtgtagagaggagggctgggtaaagctctcagtacccagagtaccgtggcagttaatctgaaggccacagaagtataatcatgggtttagtgggcaagtgagccaatagttcagagcaaatgccagaggctcggattttcttatagttggttacctaggggcttctgcccaagccatgaagataagctcccnctttcaaatgacgagagatacagcaacattattgtctgttaaaatcatcaaaactcttcccattttcaggattaagccagcaaacaccatagctcagcactcagttacatcatgtcctaaccaaattttctagactcttggtcctttcccgtgcattcactcagtactccaagaatgttggtctactcaagtttttttaaatacgctacttttttttaattgccctatgactttgtctatgcaaagccttaattaacttccacgaatctgaaagcttgcaatagctattgcactattttattatgaaaatgtgttggcgtctataaggtg

SEQ ID NO: 2941 - DNA, 661 bp, Homo sapiens
  misc_feature [331]..[331]: Chromosome 6, SNP identification no. = rs1040155
  misc_feature [331]..[331]: allele = c, in linkage disequilibrium with rs9452134, respectively
  misc_feature [331]..[331]: n is a, t, c or g
attatggtgtcatgggatagaactgcaacagaaatcctgatcaaagatgaaacatacatggatttgaccattcaggactcagaatatacacagtgcaggaagcaacagcagcattcatggatttagtgaattcatcttatcaagcaccttatagacgccaacacattttcataataaaatagtgcaatagctattgcaagctttcagattcgtggaagttaattaaggctttgcatagacaaagtcatagggcaattaaaaaaaagtagcgtatttaaaaaaacttgagtagaccaacattcttggagtactgagtgaatgcacgggaaangaccaagagtctagaaaatttggttaggacatgatgtaactgagtgctgagctatggtgtttgctggcttaatcctgaaaatgggaagagttttgatgattttaacagacaataatgttgctgtatctctcgtcatttgaaagtgggagcttatcttcatggcttgggcagaagcccctaggtaaccaactataagaaaatccgagcctctggcatttgctctgaactattggctcacttgcccactaaacccatgattatacttctgtggccttcagattaactgccacggtactctgggtactgagagctttacccagccctcctctc

SEQ ID NO: 2942 - DNA, 661 bp, Homo sapiens
  misc_feature [331]..[331]: Chromosome 6, SNP identification no. = rs2325466
  misc_feature [331]..[331]: allele = t, in linkage disequilibrium with rs9452134, respectively
  misc_feature [331]..[331]: n is a, t, c or g
tcaaatccatgtatgtttcatctttgatcaggatttctgttgcagttctatcccatgacaccataattactatttgtagagctacttttactcctggactgggagattttgggtggaagagacaatgattattctgtgtgatggttgattttgtgtgtcaacttgactaggccaaataactggttaaatatttgtaggtgtcaagagaaaacttcatcttcaacttttgaagattcactaaaaaatcaacacacaaaaggcagattaatcagagaaaaggcatacaaattatttaatgtgtacatggggagaatcacaaagtgataattcncccacccccaacagaggtcagaagcttatatgtcatcctggcaccacaggttttggggggaggaaggagaaaaggaattctgttgaggggcttcctagggagaatgaatggatcaggtaacagagatgatatctggtgaaagtgtctcttcaggcatagttacaatcttggtcttacagggaggggaacaaaaaacaattattctccttggttggtctggatcttaggcagataaagaaacttcagtttcacagatggcaggagatgaggaagtcagagaacacttgaggttttctccagtatgtcaaagcaccatattttggggtatca

SEQ ID NO: 2943 - DNA, 661 bp, Homo sapiens
  misc_feature [331]..[331]: Chromosome 6, SNP identification no. = rs1606923
  misc_feature [331]..[331]: allele = t, in linkage disequilibrium with rs9452134, respectively
  misc_feature [331]..[331]: n is a, t, c or g
gaatggatgatgcccacctacatggaggagggtcatctgctttattctgttcaccagtccaaacactaatctttttggaaacactctcacagacacacccataaatcattggttggggctcataggctgataccccaaaatatggtgctttgacatactggagaaaacctcaagtgttctctgacttcctcatctcctgccatctgtgaaactgaagtttctttatctgcctaagatccagaccaaccaaggagaataattgttttttgttcccctccctgtaagaccaagattgtaactatgcctgaagagacactttcaccagatatcntctctgttacctgatccattcattctccctaggaagcccctcaacagaattccttttctccttcctccccccaaaacctgtggtgccaggatgacatataagcttctgacctctgttgggggtgggagaattatcactttgtgattctccccatgtacacattaaataatttgtatgccttttctctgattaatctgccttttgtgtgttgattttttagtgaatcttcaaaagttgaagatgaagttttctcttgacacctacaaatatttaaccagttatttggcctagtcaagttgacacacaaaatcaaccatcacacagaataat

SEQ ID NO: 2944 - DNA, 661 bp, Homo sapiens
  misc_feature [331]..[331]: Chromosome 6, SNP identification no. = rs1606922
  misc_feature [331]..[331]: allele = a, in linkage disequilibrium with rs9452134, respectively
  misc_feature [331]..[331]: n is a, t, c or g
atctttttgttctaatcaggccctcaatggaatggatgatgcccacctacatggaggagggtcatctgctttattctgttcaccagtccaaacactaatctttttggaaacactctcacagacacacccataaatcattggttggggctcataggctgataccccaaaatatggtgctttgacatactggagaaaacctcaagtgttctctgacttcctcatctcctgccatctgtgaaactgaagtttctttatctgcctaagatccagaccaaccaaggagaataattgttttttgttcccctccctgtaagaccaagattgtaactangcctgaagagacactttcaccagatatcatctctgttacctgatccattcattctccctaggaagcccctcaacagaattccttttctccttcctccccccaaaacctgtggtgccaggatgacatataagcttctgacctctgttgggggtgggagaattatcactttgtgattctccccatgtacacattaaataatttgtatgccttttctctgattaatctgccttttgtgtgttgattttttagtgaatcttcaaaagttgaagatgaagttttctcttgacacctacaaatatttaaccagttatttggcctagtcaagttgac

SEQ ID NO: 2945 - DNA, 661 bp, Homo sapiens
  misc_feature [331]..[331]: Chromosome 6, SNP identification no. = rs12194329
  misc_feature [331]..[331]: allele = c, in linkage disequilibrium with rs9452134, respectively
  misc_feature [331]..[331]: n is a, t, c or g
tacaatcttggtcttacagggaggggaacaaaaaacaattattctccttggttggtctggatcttaggcagataaagaaacttcagtttcacagatggcaggagatgaggaagtcagagaacacttgaggttttctccagtatgtcaaagcaccatattttggggtatcagcctatgagccccaaccaatgatttatgggtgtgtctgtgagagtgtttccaaaaagattagtgtttggactggtgaacagaataaagcagatgaccctcctccatgtaggtgggcatcatccattccattgagggcctgattagaacaaaaagatggtgnaaaattaaattcactctcctcatgactgatggagctgaaacattggtcttctcctgcccttggcactgctggttctcaggccttcagaatgggactgaaatctataacaccagctctccaaatcttagaccttttaaccacactacggctatcctgggtgtccagcttatagaaggcagatagtgggacttctcggcctccataatcatgtgagtgcattccttataataaatattatgttatgcataatattaatatgaataatatttataccttactggaagtgtgtgtgtgtgtgtgtgtgtgtgtgtgtgtgtgtgtgtgtgtgtg

SEQ ID NO: 2946 - DNA, 661 bp, Homo sapiens
  misc_feature [331]..[331]: Chromosome 6, SNP identification no. = rs1546613
  misc_feature [331]..[331]: allele = t, in linkage disequilibrium with rs9452134, respectively
  misc_feature [331]..[331]: n is a, t, c or g
ttcatatatatcttaattttaatatcaaatatgagaatgaaatctaaaatttattggacattcatttatgtaccttgtagagtccttatcttatttagttctcaaaacaacctatcagtacagatagtgttaacgtcattccacagtcaaagatattgaagctcagaaaattcaagcaaattgttcataagtacagctaatgcatgcaggtgacagaacttgaacctgctactactacccaattctaacaactattctcaatacaggagattttcttccaggaatttcatctgttaaattgctgctcacctttgccttgattttataggtnttgttctttatttctttaactagccttagaacccattacatttctcgaagtggttttccaagaggactcttctttttcagtaggtactcatctgaaaataattaatacttttataacttataacttccttaaataatttaaaaataaatgtatgttatatttaaatatttattttagattatatttttaactttttatatatttatatattctaatttatattataatgtatttttgctttatatttaagttcttttaggcagcatggacccacatcagctttgggtgtgaatatttaatatttataaaacaccttccttgcaacagtaa

SEQ ID NO: 2947 - DNA, 661 bp, Homo sapiens
  misc_feature [331]..[331]: Chromosome 6, SNP identification no. = rs4269341
  misc_feature [331]..[331]: allele = c, in linkage disequilibrium with rs9452134, respectively
  misc_feature [331]..[331]: n is a, t, c or g
atttaaggaagttataagttataaaagtattaattattttcagatgagtacctactgaaaaagaagagtcctcttggaaaaccacttcgagaaatgtaatgggttctaaggctagttaaagaaataaagaacaatacctataaaatcaaggcaaaggtgagcagcaatttaacagatgaaattcctggaagaaaatctcctgtattgagaatagttgttagaattgggtagtagtagcaggttcaagttctgtcacctgcatgcattagctgtacttatgaacaatttgcttgaattttctgagcttcaatatctttgactgtggaatgangttaacactatctgtactgataggttgttttgagaactaaataagataaggactctacaaggtacataaatgaatgtccaataaattttagatttcattctcatatttgatattaaaattaagatatatatgaagattaggatatctttaatgaaaaaaatcaaacagtaaaatgtaatcaatagataaaattgatgttagctagcagaggcagaaaattaccatgcatttcttaaacgaacagtttttatccccaaactcaatgccaaatagttgatttctattctatttttaaaataaagcggataacctctttctcattaatttatc

SEQ ID NO: 2948 - DNA, 661 bp, Homo sapiens
  misc_feature [331]..[331]: Chromosome 6, SNP identification no. = rs4599596
  misc_feature [331]..[331]: allele = t, in linkage disequilibrium with rs9452134, respectively
  misc_feature [331]..[331]: n is a, t, c or g
tgtaatgggttctaaggctagttaaagaaataaagaacaatacctataaaatcaaggcaaaggtgagcagcaatttaacagatgaaattcctggaagaaaatctcctgtattgagaatagttgttagaattgggtagtagtagcaggttcaagttctgtcacctgcatgcattagctgtacttatgaacaatttgcttgaattttctgagcttcaatatctttgactgtggaatgacgttaacactatctgtactgataggttgttttgagaactaaataagataaggactctacaaggtacataaatgaatgtccaataaattttagatntcattctcatatttgatattaaaattaagatatatatgaagattaggatatctttaatgaaaaaaatcaaacagtaaaatgtaatcaatagataaaattgatgttagctagcagaggcagaaaattaccatgcatttcttaaacgaacagtttttatccccaaactcaatgccaaatagttgatttctattctatttttaaaataaagcggataacctctttctcattaatttatctcttggaaaatcatactaatcaatatctataagtaaacactattcctaagttttaaatttaccaaaacattataaattataatttaaaaggctt

SEQ ID NO: 2949 - DNA, 661 bp, Homo sapiens
  misc_feature [331]..[331]: Chromosome 6, SNP identification no. = rs9345286
  misc_feature [331]..[331]: allele = g, in linkage disequilibrium with rs9452134, respectively
  misc_feature [331]..[331]: n is a, t, c or g
ttggatatctcactttggtaatttggaaccagctccttcgaagatgtgctctctcctcccccactccactcccaagagacttacattgaatgtaactccacctctttttcccttacctttgtgctgtgcatacccaccctaaagaagtgaacatcagatgcaacatcgcatcaagaaaaggctgaaaatgtatcatcaataattatctatctattagagagataaattctgatgcttctttgaagtcacatgtaaatgacatttgaggttttataaatagaagcaatgcttctgaaacaatgcaaaaataaagcataataagaagctggtnttgagaaaacagaagggaattattgttgtgattatttagtgaactaaatttagactaggagtgacactcaagatacatccattaccatattttccattagccacatgtcatcctaagcaatatcgcactgctattccattgctaattttagcttgaataatataaattatttcttatgttcaatttacttatttgatatgacaatttaaaagaaaagtattcctctgaatttagtgtaaaaaatggcatgcaatgtgcctattactggcaaaagcaagggtctgtttcaattctccctgtcacctctgaggtagttgtaacagttattgc

SEQ ID NO: 2950 - DNA, 661 bp, Homo sapiens
  misc_feature [331]..[331]: Chromosome 6, SNP identification no. = rs9294541
  misc_feature [331]..[331]: allele = g, in linkage disequilibrium with rs9452134, respectively
  misc_feature [331]..[331]: n is a, t, c or g
aaatagaagcaatgcttctgaaacaatgcaaaaataaagcataataagaagctggtgttgagaaaacagaagggaattattgttgtgattatttagtgaactaaatttagactaggagtgacactcaagatacatccattaccatattttccattagccacatgtcatcctaagcaatatcgcactgctattccattgctaattttagcttgaataatataaattatttcttatgttcaatttacttatttgatatgacaatttaaaagaaaagtattcctctgaatttagtgtaaaaaatggcatgcaatgtgcctattactggcaaaancaagggtctgtttcaattctccctgtcacctctgaggtagttgtaacagttattgctttcccaggttttgcattttgcttcttgtttaaaccagcactgctttttttctttaaacttgttcaatttactctgcacatatttgaaaatcagtgcaaattaaggtttctgttaagaaaaaaaataatttgaaaaatgctgacagtataaaacatataaaataccagctgtaattatcttttggtagcttaattccagtactttgctgaatacttttatttttaggtgaaataaaaagaagaaatgttcactttttagataggtattgagttc

SEQ ID NO: 2951 - DNA, 661 bp, Homo sapiens
  misc_feature [331]..[331]: Chromosome 6, SNP identification no. = rs1515800
  misc_feature [331]..[331]: allele = g, in linkage disequilibrium with rs9452134, respectively
  misc_feature [331]..[331]: n is a, t, c or g
gttaaaggaatatgctacctctgtaattggtttgcttttataaagaaaagaagtaataaatatttctcccctaaatgaaatttaattgaaggcatgctattttagagctgaacctaaatgttaacttatgtgaaaagatattattttcataaaatattttggaaatttagatctttaaataaaatagcaacattattaagacaatatttttagcctcagagtagaaatgcatttggtcctacaggttttcccctttcataatgcactgcttattaacaaagaaagttggttatattcagggttgttgaactattctccactttgtaaattnaaaattgtgaagtcttttctccaaaattatatttctaataaatacaatcattacccaaattattcttatagagcatttaaattaaaatcccaatactttttttctgaactcaatacctatctaaaaagtgaacatttcttctttttatttcacctaaaaataaaagtattcagcaaagtactggaattaagctaccaaaagataattacagctggtattttatatgttttatactgtcagcatttttcaaattattttttttcttaacagaaaccttaatttgcactgattttcaaatatgtgcagagtaaattgaacaagtttaaagaa

SEQ ID NO: 2952 - DNA, 661 bp, Homo sapiens
  misc_feature [331]..[331]: Chromosome 6, SNP identification no. = rs2325467
  misc_feature [331]..[331]: allele = c, in linkage disequilibrium with rs9452134, respectively
  misc_feature [331]..[331]: n is a, t, c or g
aatgctgacagtataaaacatataaaataccagctgtaattatcttttggtagcttaattccagtactttgctgaatacttttatttttaggtgaaataaaaagaagaaatgttcactttttagataggtattgagttcagaaaaaaagtattgggattttaatttaaatgctctataagaataatttgggtaatgattgtatttattagaaatataattttggagaaaagacttcacaattttgaatttacaaagtggagaatagttcaacaaccctgaatataaccaactttctttgttaataagcagtgcattatgaaaggggaaaanctgtaggaccaaatgcatttctactctgaggctaaaaatattgtcttaataatgttgctattttatttaaagatctaaatttccaaaatattttatgaaaataatatcttttcacataagttaacatttaggttcagctctaaaatagcatgccttcaattaaatttcatttaggggagaaatatttattacttcttttctttataaaagcaaaccaattacagaggtagcatattcctttaacatcagctcaaaatcaaaactatttatttggggaaaagttcataaaatcatagcagttcacattgtaagccacagtcagttatagtg

SEQ ID NO: 2953 - DNA, 661 bp, Homo sapiens
  misc_feature [331]..[331]: Chromosome 6, SNP identification no. = rs7767505
  misc_feature [331]..[331]: allele = a, in linkage disequilibrium with rs9452134, respectively
  misc_feature [331]..[331]: n is a, t, c or g
tgtcttaataatgttgctattttatttaaagatctaaatttccaaaatattttatgaaaataatatcttttcacataagttaacatttaggttcagctctaaaatagcatgccttcaattaaatttcatttaggggagaaatatttattacttcttttctttataaaagcaaaccaattacagaggtagcatattcctttaacatcagctcaaaatcaaaactatttatttggggaaaagttcataaaatcatagcagttcacattgtaagccacagtcagttatagtggattttatagatactgtaaaattgctgtttgaaaaaatattnttgaacttcaggtttctaaaagtctcaatatgttaaactgcacctcatattttataacatttaataatggttcacttttttcaagcctcagaggtttaaaggccatttagatgtgttcaaaaggaaagcatcaaatactgtagattccctgaaacataaacaaaggtctttaaaactagtacataagagcaagtggttcagtgaaaaatttccttcataattgaaagtccatatacaactacaagaaataaaattagaaattaatttatttaaagcttttaattaaaagaaaatttgttttaacattctcacagtatacaagacaaataa

SEQ ID NO: 2954 - DNA, 661 bp, Homo sapiens
  misc_feature [331]..[331]: Chromosome 6, SNP identification no. = rs9351333
  misc_feature [331]..[331]: allele = c, in linkage disequilibrium with rs9452134, respectively
  misc_feature [331]..[331]: n is a, t, c or g
ttctctgggtttattaaaaaattgatgtttaaaatattaataactattatgttcatagctgaattaggagaatattaactagaatagatacatttcaaagatttgtctcatattttctttagctatttttttccattatcagaatcctaatacccacttcacagtagcacacattgtccatagggctaacactacatactgtccatagaccaaggctaggttctgagtatgttgtcctggggagctcatgctagattttgatactttttaaaattataaatattataagtggtgtctactattgagtctccaaagagaataccagaatganacattgatgaagaaagcgtatttgtttacctactgcatggggcagaacaccatcttgactgaggcttagtagtgtcttagaaggggagcttaagcctgatactgttgtggttcagggatctccttgcaagtggtttaaggcaatctttcaatgtaggatttaattaaggctaagcaaaattcttaatagtttattattgtaaaacagatgaattcaaggaatgactcttggtaagtagttgtttgataggcaagtatgtttgactagttgagtgaactattgtcctgagaaggggcttggtcaatgtattagttcattttcatgctgctt

SEQ ID NO: 2955 - DNA, 661 bp, Homo sapiens
  misc_feature [331]..[331]: Chromosome 6, SNP identification no. = rs9294548
  misc_feature [331]..[331]: allele = g, in linkage disequilibrium with rs9452134, respectively
  misc_feature [331]..[331]: n is a, t, c or g
gaattcaaggaatgactcttggtaagtagttgtttgataggcaagtatgtttgactagttgagtgaactattgtcctgagaaggggcttggtcaatgtattagttcattttcatgctgcttatagagacatacccaagactgggaagataaagaggtttaatggacttacagttccacatgactggggaggcctcaaaatcatgacaaaaggtgaaaggcacatctcatatggtggcagacaagaaaagagagcttgtgcagggaaactcccccttatagaaccatcagatctcgtgatacttattcactatcatgagaacagcacaaganaggcctgccccaatgattcagttacctcccactgggtccctcccacaacatgtgggaattcaagatgaaatttgggtggggacaaagccaaaccatatcattccaaccctggcccctcccaaatctcatgtccttatatttcaaaacaaatcatgccatcccaacagtctcccaaagtcttaactcatttcatccttaactcaatagcccacagtccaaagtctccttcaagacaaggcaagtcccttccgtgtataagccagtaaaatcaaaagcaagttagttacttcctagatacaatggggtacaggcattgggtaaacacagcca

SEQ ID NO: 2956 - DNA, 661 bp, Homo sapiens
  misc_feature [331]..[331]: Chromosome 6, SNP identification no. = rs1515782
  misc_feature [331]..[331]: allele = g, in linkage disequilibrium with rs9452134, respectively
  misc_feature [331]..[331]: n is a, t, c or g
tatgtaacctacaaatcacatgaagtatcttaatcattcgccttcctgttttgtttattctacagctattatcatcactattatcaaattagacgttagttcttgccacctaaactggtgtttggtagttacgtggccaggggtgaaactataatagttcagtagatgttaaatgcaaaaacattataaattagtgttctctgaaaacactgaagttttgatgaatacccattgttttcctctcatcttttataataattcataagggacaattatttacatattattttcttccagaaatgaaaacaataaaggcagatattaaattctngtgttcctattatttgctcatatcttccacatgctggttcttggatgaagtgattggttcaccacaatcctaggacagtgctttgaacatcagtgtcatagcctactacatgggacacatcaacagcatagcatctaatacaaccaaatggtactggtacatgaagttgtttagaagagcagtttcaaatgaaaaaatgcgagacacatcggagtctcacaggtatagccatgtcagcagggacaaatcataatcaattttgagtaaaaataaagttaatggcatattgcctttctttccacttcacaaatgtcaggaaatataaaataa

SEQ ID NO: 2957 - DNA, 661 bp, Homo sapiens
  misc_feature [331]..[331]: Chromosome 6, SNP identification no. = rs981156
  misc_feature [331]..[331]: allele = c, in linkage disequilibrium with rs9452134, respectively
  misc_feature [331]..[331]: n is a, t, c or g
tgaagttttgatgaatacccattgttttcctctcatcttttataataattcataagggacaattatttacatattattttcttccagaaatgaaaacaataaaggcagatattaaattctggtgttcctattatttgctcatatcttccacatgctggttcttggatgaagtgattggttcaccacaatcctaggacagtgctttgaacatcagtgtcatagcctactacatgggacacatcaacagcatagcatctaatacaaccaaatggtactggtacatgaagttgtttagaagagcagtttcaaatgaaaaaatgcgagacacatnggagtctcacaggtatagccatgtcagcagggacaaatcataatcaattttgagtaaaaataaagttaatggcatattgcctttctttccacttcacaaatgtcaggaaatataaaataagtgcctgagaaaaagacactaaaaaaaacacaagctatcattatgttttaaaatgattaaaatcatattttcaaaaatatagtaaattctatatataactataaagtatgttcaaatttccaacatctgtgatctacctacataatcaaggaaagtaatcaggaaaatgaatattcctagagtctcaagcaaatcactccaaaatatgct

SEQ ID NO: 2958 - DNA, 661 bp, Homo sapiens
  misc_feature [331]..[331]: Chromosome 6, SNP identification no. = rs9345289
  misc_feature [331]..[331]: allele = a, in linkage disequilibrium with rs9452134, respectively
  misc_feature [331]..[331]: n is a, t, c or g
gaatggaagcatttgcttgtcctatgattgggtttctctcagccttttagggagtctatggctctggactgtgaactttacaagtgtttctaagtgtttatctaccctgccttaggtgagacaggatggctggagtaagctagggttgggcattttccttctctctgataggttaatctctgataaaagccccagcaggttaagctctggttaagtagtttctcctgaggccaaacctcattaataataaaatctggtatattttgaaatggttcttcttcctctccccctggcggaagcactaggagaattttctttgttatttactgtnaaaacctaggtgagctcctggaagtagaactcacacacacacaaagcctgggtgcccccatatgactgggtcccatgggagtttttaactctcatccttttccacactgagcctccagcatttcatcaattacagctcaggtttccccatggtgacactggttctgtgggtttctgctctggtatgttgtgatgctctgtatctgcctctctgtctctctaattctgcagcagtggtttgccctgcgacctcacttcttttacagatctaagaagagttttcaatgtttcagtttgttcagctttttatttgttgtttggacagagtggt

SEQ ID NO: 2959 - DNA, 661 bp, Homo sapiens
  misc_feature [331]..[331]: Chromosome 6, SNP identification no. = rs874423
  misc_feature [331]..[331]: allele = c, in linkage disequilibrium with rs9452134, respectively
  misc_feature [331]..[331]: n is a, t, c or g
ttttatttgttgtttggacagagtggtgacttccaagctgcttacacacagaactaggaacaggaagtccacacctctgtcaactcttgatctagtttgtcgagtttggcctctgtctgtgcagacttaaagcagtaacttaatctctacgtattttcatttcaccatttgtaaaataaagcagctgaacttgatatcacactagaacttgatcaaaagcccaagaagcaacaatgttttgccaatccctatgttatcttccctttttaaaattctgtaatgctgtgattacaaatagcttcctagttcctaaaaatttgatgttttaagngtcttactatttaagggtttaagaaaggacatttgcacaataatatacgatatccaaatttaaatataaaatatgcccaagaaaagcagataaggtctgcagtacctcagtgtccatataatggcattgaacaaatggaaacagatggtctgagagaattagacatattcttgtctattaaccactcctaagagatcatccctcaaataagagtttgtctaataacagttttaggtctatgcattatagatgaagacatttgaagaccaaaagcattcacatctgtagtttttaaattttaggcatactgagagttgtcaggaaaaatat

SEQ ID NO: 2960 - DNA, 661 bp, Homo sapiens
  misc_feature [331]..[331]: Chromosome 6, SNP identification no. = rs9353952
  misc_feature [331]..[331]: allele = t, in linkage disequilibrium with rs9452134, respectively
  misc_feature [331]..[331]: n is a, t, c or g
tggatttggacaacatgagttgctgtgagacctagacttagagtagaggcctaaggaagaatctcttctgttcttcacttgctcctctggtcctcaccattcttcttacatggataaaaggaaagagacattattccttaaaacttaaagcaaaggtgacctatgccatcccctatctttacattgttttattcttccaatggaggggcacctctatgcaggaagtagctctagttccattatactacttcattgtcatgagacagaaacaagtagagaagaagcagctgagtataagaaggaatatcatttttacattttatattttacntaattttctttcttccaccaaactttgactgctattattaatgtctttagtttgttcctggtacatgtcaggtgtcagtggaagaggagagaggagaataaaatatgaaataaggagaaagagcagaaggaactgtggccactcagaggcacctggaaccttcctccagctaagactagtctttgtagaccacagtgtagcatgctctggaggcagcctgaaaaaatcatgtagccagcttaaggaaaaatgccagaaaagtgattaagttgattccttcttccccttatattctagacagcacattattcatgccgtttctggcaccaa

SEQ ID NO: 2961 - DNA, 661 bp, Homo sapiens
  misc_feature [331]..[331]: Chromosome 6, SNP identification no. = rs4707763
  misc_feature [331]..[331]: allele = t, in linkage disequilibrium with rs9452134, respectively
  misc_feature [331]..[331]: n is a, t, c or g
aaacaagtagagaagaagcagctgagtataagaaggaatatcatttttacattttatattttacttaattttctttcttccaccaaactttgactgctattattaatgtctttagtttgttcctggtacatgtcaggtgtcagtggaagaggagagaggagaataaaatatgaaataaggagaaagagcagaaggaactgtggccactcagaggcacctggaaccttcctccagctaagactagtctttgtagaccacagtgtagcatgctctggaggcagcctgaaaaaatcatgtagccagcttaaggaaaaatgccagaaaagtgatnaagttgattccttcttccccttatattctagacagcacattattcatgccgtttctggcaccaaaggataaattaggctgtctgaatattctcggcagaaaagaagctataatagcaaactgagttatacaacattctgaacaaaatgcaataaggcatgtaataggccaaatcaactccaaagttaagcttaagaaaaagtcctctgctctcaattgtgtgtttgtgtggcataatctattttctattctggaataaagtcaaagtgagagcagctttgacattatgaatcacctgcatcagagtgagctctatcacacaaacaattta

SEQ ID NO: 2962 - DNA, 661 bp, Homo sapiens
  misc_feature [331]..[331]: Chromosome 6, SNP identification no. = rs9353955
  misc_feature [331]..[331]: allele = a, in linkage disequilibrium with rs9452134, respectively
  misc_feature [331]..[331]: n is a, t, c or g
ttctaacagatattgacagtgtttacctgttcctccttgagtgtttacctttgctgcagaagctggaaagtaataactacatttcctaggttcccttgcagctaaacttcagaatgatttaggttctaccagtcagatactcttttgtgaagcttgaatgtagaacagaggacaagtatacatattatagtattattttttaaagcctagtctagtgatattttatgctgccagtccattatacttttgctcccattcttatttatactacttttcatttgcatatttttgtaagccaccttaagaactttcaagaacagtcaatgttgancatgtacttttagataattttgaacactcttatgtccaataatattatcaaaaatcttctccaagagcattatataaaagtttttaaactcttggctagtctgatgcttagaaaaagccatctcattgtgttttaatttatatttacctagtttttgaaggtgttgatttttttaatgctttttagaagtttatggaccttctttggaaaaattaaaattcatgcctactggagtttgaattcatcccccaaagcttatttgttagaaacttaatccccaatgcatcagtattgagagatgggacctttaagatgtgattaggtcatgaa

SEQ ID NO: 2963 - DNA, 661 bp, Homo sapiens
  misc_feature [331]..[331]: Chromosome 6, SNP identification no. = rs9360000
  misc_feature [331]..[331]: allele = c, in linkage disequilibrium with rs9452134, respectively
  misc_feature [331]..[331]: n is a, t, c or g
atacaacaatgaaagcacataaagcagaattgttcaacacttagacattatttagatatttcatttttgaaagatagagtgaacactgaaaaaattaactcaagccttaaaaggtgaggaagaaaacttaaaacaagttgtgaatcaagtattaccacataactgcatttagtaatgttttaaaggctgtgaaggaaaagagagacaataaaagcctagaaatgagaacatattgtttccatgtccagagaatgagaaaaagatagatgtaaaaactatacagtcagcttgatattatatcctgaaaaaatcctagccctgctaactaaanagatgatttgtaaatatttaagaagagtgatctgagagaactatgacattcctaaattggtatattttcctctctgctcagataacaaacagcagatcaggaaattctaccttgttgcatttcagcagaatatttgataaatctctcatatatcatcgctgtcaggaaaaatgagtatggactgctgggataatttgtagctggctaaacaatatttccccccaaatttgatcatttgaactaagagaagtttctttaagtggcgttgtcaaactttttaggttggaacttaaaatagaacatatgaaacaaatttgagtatgcatgctt

SEQ ID NO: 2964 - DNA, 661 bp, Homo sapiens
  misc_feature [331]..[331]: Chromosome 6, SNP identification no. = rs9351339
  misc_feature [331]..[331]: allele = t, in linkage disequilibrium with rs9452134, respectively
  misc_feature [331]..[331]: n is a, t, c or g
gatattatatcctgaaaaaatcctagccctgctaactaaacagatgatttgtaaatatttaagaagagtgatctgagagaactatgacattcctaaattggtatattttcctctctgctcagataacaaacagcagatcaggaaattctaccttgttgcatttcagcagaatatttgataaatctctcatatatcatcgctgtcaggaaaaatgagtatggactgctgggataatttgtagctggctaaacaatatttccccccaaatttgatcatttgaactaagagaagtttctttaagtggcgttgtcaaactttttaggttggaacntaaaatagaacatatgaaacaaatttgagtatgcatgctttttatttattcatatataaattatttacatacttgaaattattttaataaaaatttcatatatttatcatgtaaaaatgatattttgaaatatgtatacattgtggaatggctcagttgagaaaagtaactgatgtattacctaatattcttattcattttttttgtggtgcaaacacttaaaatgttttctctttgagattttcaataaaatatactgttgttaactacaatcatcatgttttataattattcctcctatctaattataattttgtatagtttaactaa

SEQ ID NO: 2965 - DNA, 661 bp, Homo sapiens
  misc_feature [331]..[331]: Chromosome 6, SNP identification no. = rs9353957
  misc_feature [331]..[331]: allele = t, in linkage disequilibrium with rs9452134, respectively
  misc_feature [331]..[331]: n is a, t, c or g
aatccatgaacatgggatatctttccattcatttgtgtcttctttaacttctttcagcaatgttttataattttgagtgtacagatcttccactttcttagttaaatgtatttctgagtgattttttgtagatattgtaaatgggattgtttctacaattgctttttcagatagtttattggtagggtgtagaaacactattgatttttgtatgttaattttgtatctttcaacttcactgaatttattttttagttctaacagttttttagtggagtctttagcattttctatatataaaatcatgttctctctaaaatttatcttttcnttttcaatttggatgacttttatttatttctcttgccaaattgctgtggctagaatatccagtactatgttgaatagaagttagaaaagtagtcatccttgtcttatttctgattttagagaagcacttttaacttttcactgttgcatatgttagctgtgggtttgtcttatatggccattactgtattgaggcacattcctcctatacccaatttgttgaaagtttttatcattaaataatattgaactttgtaaaatgcttttccagcatcaattgtgataattataggctttttgtccttcattctgttaatgtgatgtatcatat

SEQ ID NO: 2966 - DNA, 661 bp, Homo sapiens
  misc_feature [331]..[331]: Chromosome 6, SNP identification no. = rs1591740
  misc_feature [331]..[331]: allele = a, in linkage disequilibrium with rs9452134, respectively
  misc_feature [331]..[331]: n is a, t, c or g
tagttctttaaatgtttggaaaattcaatagtgatgccatcagattcttggctcttcttggatgggagactatttattactgattaaatctccttgctcattatttgttcaaattttgtatttcttcatgattcagtcgtggtatgttgtatatgtctataaatttatatattttttagattatccatttttgtcatctaattgtttatagtggtctcttcatatttctgtatcagttgtaatgtttctcttttattttttttttatttatttgtcttctctttattagcctagctgtcatttttatctttttgaaaaactccatttcacngatcttttctattgtttttctagtctgtattttatttctgaactgatatttttatttgtttccttctactaaccttgggcttagtttgttcttctttttcaagttttttgaggtaaaatgtcaggttgtttatttaggattttagttatttttttatgtagtcaggcatttattgcaataaaagtccctctaagaactgcttttgctgcatcccataagtttcggcatattgtgtcaccatttttgtttgtctcaagatatttttaaatttcttctttaaatttcttcttatacccattggttgttcaggagcgtgttgtcacccaagac

SEQ ID NO: 2967 - DNA, 661 bp, Homo sapiens
  misc_feature [331]..[331]: Chromosome 6, SNP identification no. = rs6934758
  misc_feature [331]..[331]: allele = a, in linkage disequilibrium with rs9452134, respectively
  misc_feature [331]..[331]: n is a, t, c or g
ttgtttccttctactaaccttgggcttagtttgttcttctttttcaagttttttgaggtaaaatgtcaggttgtttatttaggattttagttatttttttatgtagtcaggcatttattgcaataaaagtccctctaagaactgcttttgctgcatcccataagtttcggcatattgtgtcaccatttttgtttgtctcaagatatttttaaatttcttctttaaatttcttcttatacccattggttgttcaggagcgtgttgtcacccaagactgccttgtatacaaattcccctgagtaaatctttgaccacttacaaacctggagcngtctgccttatttttaggtctgatcttgtcttgcacgtatagagggtgattttctattccagaaggtagtttttccaacacacgaaggtaacataacagactagttataacagactgttttaagataacaacaacataactttaatctcattaaaaattcaacatgttttacttctcctcacattttcccttattttattatatttcatttatttttaaagacacttttaataaaaaagctcatcaggagggtgaaacacaaatttatcagttaagtaacgacttctacgtagcactacatttaggataattaacagaagggccatgagc

SEQ ID NO: 2968 - DNA, 661 bp, Homo sapiens
  misc_feature [331]..[331]: Chromosome 6, SNP identification no. = rs2506952
  misc_feature [331]..[331]: allele = g, in linkage disequilibrium with rs9452134, respectively
  misc_feature [331]..[331]: n is a, t, c or g
tcagtggtgatatcccctttatcaatttttttgtctatttgattcttctctcttttcttctttattagtctggttagcagtctatctattttgttaatcttttcaaaaaaccagccccaggattcattgattttttaaagtgttttatttttgtgtgtgtgtctctatctccttcagctctgctctgatcttagttatttcctatcttcgtcccaagacatgtcctccacagcccaacacactgtctgtggcagactgtggccacggtgtctcttaaggcctgaccctaactcatccttcctcactgggtggggcttctctgcaggaactncaataaccccagccagaggctcagggacagaaccccgatctccttggtcctgagtccctaaggtgagggggacccacagtctccctttcctcctggtagttctgaggaatctgggcagcccagatgaatgggtttcccccagtgaggcacaccgcttccaccaagtggcaaagtgctttgttaaacgagtcctgttccacaagccactcaactgtgtgagaccctctaacaagggttgtcagacaccctatacaggagtgattctacttgcaacaagttaggccccatcaaggtcagatatcccagaagaaggagcaggcacccatcttt

SEQ ID NO: 2969 - DNA, 661 bp, Homo sapiens
  misc_feature [331]..[331]: Chromosome 6, SNP identification no. = rs6927725
  misc_feature [331]..[331]: allele = g, in linkage disequilibrium with rs9452134, respectively
  misc_feature [331]..[331]: n is a, t, c or g
aaaatgaagggatggaggaaaatttaccaagaaaatggaaaataaaatcctagttgcaatcctagtctctgacaaaacagactttaaaccaacaaagatcaaaaaagacaaagaagaggattacctaatggtaaagggaacaattcaacaagaagagctaactattctaaatatatatgcatccaatacaggagcaccccgattcataaaacaagtttttagagatgtataatagactcccacacaataatattgggagactttaacaccccactgtcaatattagacagatcaatgagacagaaaattaacaaggacattcaggccttgnactcagctctagatcgagtggacctaatagacatctacagaactcttcaccccaaatcaacagaatatacatttttctcagtgacacatagcacttattctaaaattgaccacataattggaagtaaaacactcctcagcaaatgcaaaagaactgaaataataaaaacagtctcagaccacagtgcaatcaaattagaattctagattaagaaactcactcaaaaccacacaattacatggaaattgaccaatgtgctcctgaatgtaaataatgaaattaaggtaaaaatcaagaagttctttgaaaccaatgagaacaaagaaacaa

SEQ ID NO: 2970 - DNA, 661 bp, Homo sapiens
  misc_feature [331]..[331]: Chromosome 6, SNP identification no. = rs10944628
  misc_feature [331]..[331]: allele = t, in linkage disequilibrium with rs9452134, respectively
  misc_feature [331]..[331]: n is a, t, c or g
cattggcaaagtgaatccagcagcacatcaaaaaacttatccatcacaatcaagtcagcttcatccctgggatgcaaggctgattcaacatgtgtaaatcaataaacataatccatcatataaacagaaccaaagacaaaaaccatatgattatgtcaatagatgcagaaaaggcctttgataaaattcaacatcatttcatgttagaaactctcaataagctagttattgatggaaaatatctcaaaataataagagctacttatgacaaacccacagccaatatcatattgagtgggcaaaagctggaagcattctcattgaaaaccantacaagaccaggatgccctctctcactactcctatttaatgtagtatgggaaattctggtgagggctctcaggcaagagaaagacacaaaggttattcaaataggaagagaggaagtcaaattgtctctgttagcagatgacatgattttatatttagaaaaccccatcatctcaacccaaaaactccttaaactaataagcaacttcagcaaagtctcagaatacaaaatcaatgtgcaaaaatgacaagcattcctttacaccaacaatagacaagcagagaaccaaatcatgaataaaaccacattcacaatttccacaaaaagaat

SEQ ID NO: 2971 - DNA, 661 bp, Homo sapiens
  misc_feature [331]..[331]: Chromosome 6, SNP identification no. = rs2485815
  misc_feature [331]..[331]: allele = a, in linkage disequilibrium with rs9452134, respectively
  misc_feature [331]..[331]: n is a, t, c or g
aaagctaattttttaaaacagttgtttttgactacttatcaagttagtaaacttgatagtagtagactacttatcaaggtattatacaatcaaatatacttattgaggtagtattgagtattgcctgagtattgcctggaggcaggttggtaggtagtcaaagaaaactgtttaaaaatgttacaaaatcaccatacttcattcatgtaccttagatgccttttagaacaagacctcaaaaataattaacccagtcttgaaaatcttctcaagtccaacaaacaaacttttaaaaccccattttaaagacttgacaatagaacaagtatanataatgaaaacacataatttatatgtttactaatttaatgggttttcatttacatttgtaatttagaatttgttggcggaaataaaatacacacacacacataactgaaaacggtaaatttcaggaactagaaatgcaatcctatggtataaattaatttgtttttaaaaatataatttaccaaattttatcttctctgccactttggattgacagctgttgttatttagaaaattcagattgctgagagtttatttcttgcttcttgagtatgtttaatttttacaaagctttcattcatgccagtagctgccttggggtcattttcta

SEQ ID NO: 2972 - DNA, 661 bp, Homo sapiens
  misc_feature [331]..[331]: Chromosome 6, SNP identification no. = rs1002219
  misc_feature [331]..[331]: allele = t, in linkage disequilibrium with rs9452134, respectively
  misc_feature [331]..[331]: n is a, t, c or g
actcctcaccttctgataaagatcatactattggcacatgtggtgggtgaattacagaagactgagctgtctggatgacaccctgaacctgtacttgctctccaggaagaggtaccattgtcattagtacagatcatcttagtgccatctgtttagtaatatgagaaatatgagctccctgaactgctgaaccaggttgagatgctgtctctgatgtgttacacttgtgagaatcttccataatcaactcttgggggtcaagtggggtgaagagaattagtgtcacttaccagccagctgtcctagactaccttttccttaccagttaggnctgccactggcatccctcaaccacattttatatttttgatgtcacaatgtgcattttttgcattgtgtagtttttaaaacttattacaactattattgtttttaatcattttgtattttaaccgtcatactaaatatatgaatgatttatataccaccattagagtattagagtatgtggtatttgactgcatatttacttttaccagtgagatttatgtattcgtattttcctgctactagttagcatccgttactttcagcttgacgtgcttcctttagcatttttttgtgagacaggcctggtggtaataaactcccttagctttta

SEQ ID NO: 2973 - DNA, 661 bp, Homo sapiens
  LAMA2
  misc_feature [331]..[331]: Chromosome 6, SNP identification no. = rs12203042
  misc_feature [331]..[331]: allele = c, in linkage disequilibrium with rs17753229, respectively
  misc_feature [331]..[331]: n is a, t, c or g
ttttgcacattataattagttatgactgtgtggtcagaattagattttttagaactttccatctctattaattgtattatattttagaaatcagatcatgaagccacacatatcttctgttttaatttgtttcctttcttatgttctttttgtgtgtgtagggggaaaagggtgtcttctttttaaaggttactaaaagttaaaagttttacagtttattttgtaacaaatatttattaagcacctactaagtgcaaagatgaatacgatattatcattgctagtcagagaaaaagagggagagttgctttttctgccatagccctcccanttttattccatgaattctggcaggttacttgtcccttctaaatgtaaaataattaatggacaaataaggataataatatcttccttctaggattactattatgagggaataagttatacattttatgcaaagcacctagcaccatgcttggctcaaagtaacattccatctctctatttattcttttgttagtttaactttaacttctgtgtttctttaacttaattattctagttagtttaacttttcacatttttagggtgggtggcaggtgctggaaaaaaagggatgtggtgagtattcaatttttaagcaattccaaaccctttt

SEQ ID NO: 2974 - DNA, 661 bp, Homo sapiens
  misc_feature [331]..[331]: Chromosome 6, SNP identification no. = rs17753229
  misc_feature [331]..[331]: allele = a, g
  misc_feature [331]..[331]: n is a, t, c or g
tctcctttaacccatgatttcagtcatcttcaaagagctctgtgagaagactggccttgattttattcaccagcttaaaaaggaaacgtttcatttgccatctttagtagacaatggttgcagtctaataattcagaacatgtaaaagaacaggaaactcctttctcctatggaaattttagcaacaaagaataatcctctctgacaatgttgttatccactaggggaaggaaggtgctgtttccaattgaggtgatggctgacatactcactatttcaccaccgtcctgttgcttaatacaatttgtacacacaactttattctacagangcaattctcaagcttagctcagtgtttttaaaaaactgcctatgctttagaaaagtgcctagggagtttttaaaaatctagtacctggtccagtgattctgattttgtctaggacatagccagagcataatgattttttttttttttgagacagggtctcatgttgtcacccaggcaggagtgcaatggcaccatcttggctcactgcagcctcaacctccccagttcaagtgatcctcctgcctcactccccaagtagctgggactacaggtgggcaccaccacacccagctaatttttatatttttagtagagatgggtttcaccatg

SEQ ID NO: 2975 - DNA, 661 bp, Homo sapiens
  misc_feature [331]..[331]: Chromosome 6, SNP identification no. = rs11154635
  misc_feature [331]..[331]: allele = c, in linkage disequilibrium with rs6933778, respectively
  misc_feature [331]..[331]: n is a, t, c or g
aggttgcagtgagtcgagatcgcaccactgcactccagcctgggtgacagagtgagactccatctaacaaacaaacaaataaaaaaccaaggaatcagagaaatactctttgtctctgaccttgctcctaggttgttgtggtctgatttacttaggctcaagcatgcatctagcttttatagagcctgaatattatacaatttgggaggcccttgtcaaggatagaaaattatgaacataaaatcaggtacagggccttgggagaggcccaggcaagagctacactagtttcagcacattcacatctgtagaggtaggaagtgtcaataanacctgaatgtataccacatcatggattcctcaacctgcttcgctcagctatgggttttgaaagagtctctttctgagaaagaaaacaaaataacataaaacataacttaatgtaagagtcaaagttgcaaatggtgttctttgtcacaaagcttcagtgtgttgagtagtgtggaaactattgtaactgccacctccagcagaaatgtgtccctaacatcatcttacaattgaaggtggaagtatcttctgctgagtagcagattgaaggtcatgccaagagaaaaccaattatcaagtgtgaaatgcactgatgcttaatactttttat

SEQ ID NO: 2976 - DNA, 661 bp, Homo sapiens
  misc_feature [331]..[331]: Chromosome 6, SNP identification no. = rs11154636
  misc_feature [331]..[331]: allele = c, in linkage disequilibrium with rs6933778, respectively
  misc_feature [331]..[331]: n is a, t, c or g
caagagaaaaccaattatcaagtgtgaaatgcactgatgcttaatactttttataaacataaagcaaattgttccagaaaggacccatttgcaatatgaaaaagcccttaaataatgactttctaacgactttctatggacgtcgtacactttagcgttcatctcttgttgaagaggccaaagttgatgaaactatccattgagcattacctgagaactaaagccatgagaattctcatttggtaactgtaatgacataataactggcagtgatgggaaatgttaggtaattgtagatttaaatgaatccttggtcaaatctgtgtagccnaagtgaagaagaaaaactgtaacactggatttcaacacttttttcctatataatcgtttctcaatattgctaataaatgtctcacattttggttccatccatattattaatctggaggcaattcaagctaagggaagtttctgcttaggttctgctctccagcttcctccagcccagcctccgttcttgttgcttgagtaattgttactatcctattgttccacttaaaatcatttggaactctcagtgtgacacacaggtttctcacttggggaccagcctctgcccctggctaagcccctctggagctcctgcccacccttgctgaat

SEQ ID NO: 2977 - DNA, 661 bp, Homo sapiens
  misc_feature [331]..[331]: Chromosome 6, SNP identification no. = rs12211067
  misc_feature [331]..[331]: allele = g, in linkage disequilibrium with rs6933778, respectively
  misc_feature [331]..[331]: n is a, t, c or g
ccacttaaaatcatttggaactctcagtgtgacacacaggtttctcacttggggaccagcctctgcccctggctaagcccctctggagctcctgcccacccttgctgaatgacctccagcttctggccctccagcagtttgctgcctggagctgggaatgtccattcccggttcctggcatacaattattcatttgagattcagctccagtgatgctttctggtaatttttttcagaggagcgatcatattttttctatatcccttctcccccatggacctctgcccaaagcacattgaaatccttagataattacttgtttatttgccantctcccccttctagtctataaaatcctaaaagacagaggagatctgagaccatgcgtatgtcacattgttttttctgtatcatcactacttagtttgtgctggatacatactgggcacctaataaacatttgatgagtcattaagtaatgaattggagcagaactttgagataaaaagtatcatcttggttcccaaataagccatccttcagtgtctgtgcaaatgccaccctatgtaaaatgacatccctcctcttgcccactggcacttccataacctgctttgttttcctcaataacatgttatatatttttatatatatttttgat

SEQ ID NO: 2978 - DNA, 661 bp, Homo sapiens
  misc_feature [331]..[331]: Chromosome 6, SNP identification no. = rs11965227
  misc_feature [331]..[331]: allele = a, in linkage disequilibrium with rs6933778, respectively
  misc_feature [331]..[331]: n is a, t, c or g
gtagccagagctagttctagaagttagaagtctggtgggctcagatggttttttcagctttgagtctcacaaggcctaaattaaggagtcagacagatggggctcttatttgagctctgagggagaacccactttcaggctcattcaggttgttgactgaatttgcttccatgcatgagtggaactgaggttcctgtgtccttgctggctgtctgggtgaagggtgttgtttccagcatctgcaggtggactgcatcctttggctgaccctcccctttctccttcttcaaagccagccacggtgggctgagtccttgccgtgctttcaatntccgacttccacttctgccttctctctcctgcctctccttctgctgagtgattggtgtgtccctaccgctctaatccaggataatctctttcttttaggaaacataaccttaattccccctgccatgtctattttgccaggtaatataacctgttcaaagcatggtatcaggagtgaagatcacgggggccccagtcctgttaccacagcggcctctggccttagaaaatgagagtatataggtatgcatttgtataaaggaacacttgagtgatatgaaatagatatatgtgtgtgtgtgtgtgtgtgtgtgtgtatggttagctgtag

SEQ ID NO: 2979 - DNA, 661 bp, Homo sapiens
  misc_feature [331]..[331]: Chromosome 6, SNP identification no. = rs7738227
  misc_feature [331]..[331]: allele = c, in linkage disequilibrium with rs6933778, respectively
  misc_feature [331]..[331]: n is a, t, c or g
gctttgagtctcacaaggcctaaattaaggagtcagacagatggggctcttatttgagctctgagggagaacccactttcaggctcattcaggttgttgactgaatttgcttccatgcatgagtggaactgaggttcctgtgtccttgctggctgtctgggtgaagggtgttgtttccagcatctgcaggtggactgcatcctttggctgaccctcccctttctccttcttcaaagccagccacggtgggctgagtccttgccgtgctttcaatctccgacttccacttctgccttctctctcctgcctctccttctgctgagtgattggngtgtccctaccgctctaatccaggataatctctttcttttaggaaacataaccttaattccccctgccatgtctattttgccaggtaatataacctgttcaaagcatggtatcaggagtgaagatcacgggggccccagtcctgttaccacagcggcctctggccttagaaaatgagagtatataggtatgcatttgtataaaggaacacttgagtgatatgaaatagatatatgtgtgtgtgtgtgtgtgtgtgtgtgtatggttagctgtagttggtgattagtatgaggaaaaggttatgaattgtgacttctcagagtaaagcatt

SEQ ID NO: 2980 - DNA, 661 bp, Homo sapiens
  misc_feature [331]..[331]: Chromosome 6, SNP identification no. = rs6929522
  misc_feature [331]..[331]: allele = g, in linkage disequilibrium with rs6933778, respectively
  misc_feature [331]..[331]: n is a, t, c or g
aattggctctgtttgactcacaaaatttcaagtaactgaaatagcttatgaaattcctcgcatttcttcttctcttggagtcctaagtgttgattaaaaaaagccttttctagtgagagcttgacatttccttgggggaattttaacaatactctaagctcttctctcagttccggtaattattaaggattaaaggaattgtgatgttctctggtctgtctagattatttttctttctatcagaaggatttttcaaagggcacttgacatgcccatatccttttgagcaatactaaaattctgtatttaaaaaaaggtgtaggggggctanttatcttttgagaagaaaaagctagtttcatggctttcatttttctcacaaatctgcccacacacacacacacacaaggaaagaaaaccttctgcctttcagacactcttttttttaaaaaaacataaagcaattctagacctattttgaggagatttcaaggtaatcctttttagttctcagtgtaaaataagaataatgtggctctcaatgtaaaagtttttaaaaataatttgcctaataatcattatttagctataaagtctttctggagcgtgccttgaagaactgcgaagggctttatttatttatttatttttattttttacc

SEQ ID NO: 2981 - DNA, 661 bp, Homo sapiens
  misc_feature [331]..[331]: Chromosome 6, SNP identification no. = rs6916044
  misc_feature [331]..[331]: allele = c, in linkage disequilibrium with rs6933778, respectively
  misc_feature [331]..[331]: n is a, t, c or g
aacccaggaggcggagcttgcaatgagccgagatcaggccactgcactccagcctgggcgacagagagagactccgtcaaaaataaataaataaataaataaataaataaataaataaataaataaataagataacgggttgtggagaccaaggttttatcacgcaaatgaagcctccagttagccggcttcagagaaaatagattgtaaatgtttcttatcaggcttaacgtctgtgttgctattaacgctggacgggtacaatgaggcatgtctaaacccctcttccattatgacctgaactggattttcaggtttactccagaatgcncttggctgagaggaggggttcattcagatgattgtgtggagggagggagcttagaattttatttttgctttacaaagttcactaaaaaagtcaactcccaaaaggcagatgaattggaggaaaggcatacagatttacttaatgtgtacacaacatgcatatgggagaatcccggagtgactgcccaccctgcaaggtggttcagacgcatgtgtatcatcctagcagaacaggtggggagcagggaggatttggttgagggaatctggggagaatgaatggatcagggagcagagattaacttgtatgttatcttgtgaatggatctgt

SEQ ID NO: 2982 - DNA, 661 bp, Homo sapiens
  misc_feature [331]..[331]: Chromosome 6, SNP identification no. = rs2327146
  misc_feature [331]..[331]: allele = t, in linkage disequilibrium with rs6933778, respectively
  misc_feature [331]..[331]: n is a, t, c or g
gatgaattggaggaaaggcatacagatttacttaatgtgtacacaacatgcatatgggagaatcccggagtgactgcccaccctgcaaggtggttcagacgcatgtgtatcatcctagcagaacaggtggggagcagggaggatttggttgagggaatctggggagaatgaatggatcagggagcagagattaacttgtatgttatcttgtgaatggatctgttcaggtgtgaataggttaggggggagaaagtgtataattcacatggcaccaaaataatgttaggggcggcgaatatccaagttactggtcctggcagcgaatctgtanctgtctgcagcaacctcaattcttgcctcctcagaagaaagaattcgactgacgggcatacagcagaaaaacagactgaggcaagtttcagagtaggagtggaagttattaaaaagctttagagcagtggccaggcgcggtggttcacatctgtaatcccagcactttaggaggccgaggcgggtggatcacttgaggtcagatcgagaccagcctggccaacatggggaaacctcgtctctactaaaaatacaaaaattagctgggcatggtggctcactcctgtagtcccagctacttgggaagctaaggcacgagaattgcttgaac

SEQ ID NO: 2983 - DNA, 661 bp, Homo sapiens
  misc_feature [331]..[331]: Chromosome 6, SNP identification no. = rs10782246
  misc_feature [331]..[331]: allele = a, in linkage disequilibrium with rs6933778, respectively
  misc_feature [331]..[331]: n is a, t, c or g
tgcttgaacccgggaggtggaggttgcagtgagctgagatggtgccagtgcactccagcctgggcgacagagtaagactatctcaaaaaataataataataaataaataaataagaaggaaaaaaaaaacttaagaacaggaacaaaaggaaggaaagtacacttggaagagacccacataggtgactggaaggacgagtgtggcatttgaccttttgacttttgggttttatatgctggcatacttctggagtcttgaatcccttttcccatgattctttccttggagtgggccgcccccatgcgtggtggcctgctaacacgtgggagntgaacatgagcagtgtgtgtactgcagttgtatgcatgctcacatgtggtgttcttcccttttctggtagaatgcccccagaaggccatacgctgccatttcgtctctttatgcgcatgcttgagcccagttgcccaattcctgagattttattagaagctgccaatgaccaatttcaagtttgtgtctattgggaaattgcctctccctgcacttgctctgatcaattatcattttagagaggcagtgtgaaattcctggttggtcaggagagccctctcccaccccgcttgtgcttgactagctatgtactgtaacagttacagtctt

SEQ ID NO: 2984 - DNA, 661 bp, Homo sapiens
  misc_feature [331]..[331]: Chromosome 6, SNP identification no. = rs9483268
  misc_feature [331]..[331]: allele = c, in linkage disequilibrium with rs6933778, respectively
  misc_feature [331]..[331]: n is a, t, c or g
ataagaaggaaaaaaaaaacttaagaacaggaacaaaaggaaggaaagtacacttggaagagacccacataggtgactggaaggacgagtgtggcatttgaccttttgacttttgggttttatatgctggcatacttctggagtcttgaatcccttttcccatgattctttccttggagtgggccgcccccatgcgtggtggcctgctaacacgtgggaggtgaacatgagcagtgtgtgtactgcagttgtatgcatgctcacatgtggtgttcttcccttttctggtagaatgcccccagaaggccatacgctgccatttcgtctcttnatgcgcatgcttgagcccagttgcccaattcctgagattttattagaagctgccaatgaccaatttcaagtttgtgtctattgggaaattgcctctccctgcacttgctctgatcaattatcattttagagaggcagtgtgaaattcctggttggtcaggagagccctctcccaccccgcttgtgcttgactagctatgtactgtaacagttacagtcttggttttacagggagaggaagaaaaaacaaaaacaattgttccttttggtgggttgctttaggcagataaaggcatcctgtgttttgggagagagagtgagggagggaagg

SEQ ID NO: 2985 - DNA, 661 bp, Homo sapiens
  misc_feature [331]..[331]: Chromosome 6, SNP identification no. = rs6927775
  misc_feature [331]..[331]: allele = g, in linkage disequilibrium with rs6933778, respectively
  misc_feature [331]..[331]: n is a, t, c or g
tcctgtgttttgggagagagagtgagggagggaaggtcagaaagaccttgaggcttcttcagttcagcatggaaaagtgtcagattctgggatattggtttctgacccccaacattggcaagcttatttaggtgatcttaacaacctgcctatactataaagttgcttttctaatcatcctggaaattcatcaaaggtgcatggaaatttctagaagatcctatcagaggctgtatggtctctggaagtccaagcacagagccaggaatcagcaaagtcatggccagtatgaagaagacaaatgacactcctcacgtgtctgtggagaggncctgtctatcaccctcgccagattagatgattcttttctgaaagggaattgtcttttgttccccaagagccttgcacaaaagaggcacttaaagtaaattacaaaactctgcatcatcctgcctgatattctttttgatggtatgagtgtgtgtgtggggcggggatgaggggggtggagaaagtgctgaggaggatgccatctggcaaaaactattttgtcatctttcccttttccgtggcttatttgcaaaatacatgctttcaattttccaggctttggctctatattcaaagttaagctcttagaattccaaaaataatatcccct

SEQ ID NO: 2986 - DNA, 661 bp, Homo sapiens
  misc_feature [331]..[331]: Chromosome 6, SNP identification no. = rs12210559
  misc_feature [331]..[331]: allele = a, in linkage disequilibrium with rs6933778, respectively
  misc_feature [331]..[331]: n is a, t, c or g
tataaagttgcttttctaatcatcctggaaattcatcaaaggtgcatggaaatttctagaagatcctatcagaggctgtatggtctctggaagtccaagcacagagccaggaatcagcaaagtcatggccagtatgaagaagacaaatgacactcctcacgtgtctgtggagaggtcctgtctatcaccctcgccagattagatgattcttttctgaaagggaattgtcttttgttccccaagagccttgcacaaaagaggcacttaaagtaaattacaaaactctgcatcatcctgcctgatattctttttgatggtatgagtgtgtgtntggggcggggatgaggggggtggagaaagtgctgaggaggatgccatctggcaaaaactattttgtcatctttcccttttccgtggcttatttgcaaaatacatgctttcaattttccaggctttggctctatattcaaagttaagctcttagaattccaaaaataatatccccttccccttaaaaaaaataaaaaagctcttttatttttttctctcaaaaaagcctggcttttataaataaaaagtactatggcttccaagcaattgggtctgctatgaatttacaaaatccacgcagcaattcatttgacttcaggctccctcccct

SEQ ID NO: 2987 - DNA, 661 bp, Homo sapiens
  misc_feature [331]..[331]: Chromosome 6, SNP identification no. = rs6905977
  misc_feature [331]..[331]: allele = g, in linkage disequilibrium with rs6933778, respectively
  misc_feature [331]..[331]: n is a, t, c or g
catctggcaaaaactattttgtcatctttcccttttccgtggcttatttgcaaaatacatgctttcaattttccaggctttggctctatattcaaagttaagctcttagaattccaaaaataatatccccttccccttaaaaaaaataaaaaagctcttttatttttttctctcaaaaaagcctggcttttataaataaaaagtactatggcttccaagcaattgggtctgctatgaatttacaaaatccacgcagcaattcatttgacttcaggctccctcccctggagaacagtgtgtatctaagcattgtcatgaaagccaaactatngcttccatggtagaaatttacaaggaagaagaggaacagcagcttcctaatatagctaaacactatgcccaacacattagtacctgtttgtagaattagattgcatgccatggacatgggtaggggtttccagcagggactgggaactgaaagccaccagctgacagcacacccaggtcttagggagcactccacagcatagtgcttgtcctcctcaaggaataaactcgcctcatccatcagagaaaacagaagtcctcgggtctaatcaccatccattttcttccctggtccccacttctaagctaacctcagtgagtgcctatcctt

SEQ ID NO: 2988 - DNA, 661 bp, Homo sapiens
  misc_feature [331]..[331]: Chromosome 6, SNP identification no. = rs6910834
  misc_feature [331]..[331]: allele = t, in linkage disequilibrium with rs6933778, respectively
  misc_feature [331]..[331]: n is a, t, c or g
aggctccctcccctggagaacagtgtgtatctaagcattgtcatgaaagccaaactatagcttccatggtagaaatttacaaggaagaagaggaacagcagcttcctaatatagctaaacactatgcccaacacattagtacctgtttgtagaattagattgcatgccatggacatgggtaggggtttccagcagggactgggaactgaaagccaccagctgacagcacacccaggtcttagggagcactccacagcatagtgcttgtcctcctcaaggaataaactcgcctcatccatcagagaaaacagaagtcctcgggtctaatcancatccattttcttccctggtccccacttctaagctaacctcagtgagtgcctatcctttccttccttccttcctcctgactccaaagatgaatctgttcctatttctgttcaatgcggtcctggaagatgtctaattgtctgtggagacatggggtaaatacccctcttgtgtggctccgtggctgattcggcatctgtcacctctgtcgccccaggtcagtgctcctcccatcttgacacagctgtctctgctctgaatctgttagacacatctgtctccccgtggggtggcgagctgctcaagggtggtgaccgtacctgattcctgt

SEQ ID NO: 2989 - DNA, 661 bp, Homo sapiens
  misc_feature [331]..[331]: Chromosome 6, SNP identification no. = rs6933778
  misc_feature [331]..[331]: allele = c, t
  misc_feature [331]..[331]: n is a, t, c or g
gcagcttcctaatatagctaaacactatgcccaacacattagtacctgtttgtagaattagattgcatgccatggacatgggtaggggtttccagcagggactgggaactgaaagccaccagctgacagcacacccaggtcttagggagcactccacagcatagtgcttgtcctcctcaaggaataaactcgcctcatccatcagagaaaacagaagtcctcgggtctaatcaccatccattttcttccctggtccccacttctaagctaacctcagtgagtgcctatcctttccttccttccttcctcctgactccaaagatgaatctgntcctatttctgttcaatgcggtcctggaagatgtctaattgtctgtggagacatggggtaaatacccctcttgtgtggctccgtggctgattcggcatctgtcacctctgtcgccccaggtcagtgctcctcccatcttgacacagctgtctctgctctgaatctgttagacacatctgtctccccgtggggtggcgagctgctcaagggtggtgaccgtacctgattcctgttttctcttcagaatgtagcacatcacttgcatactatacatgccccttataggattgtggaacagtgacaaaatgagtcatacgcttcaaggaaatt

SEQ ID NO: 2990 - DNA, 661 bp, Homo sapiens
  misc_feature [331]..[331]: Chromosome 6, SNP identification no. = rs2327147
  misc_feature [331]..[331]: allele = a, in linkage disequilibrium with rs6933778, respectively
  misc_feature [331]..[331]: n is a, t, c or g
atcacttgcatactatacatgccccttataggattgtggaacagtgacaaaatgagtcatacgcttcaaggaaattaacatggaagtgctgtgtgaaatggacaggagaatagaaaaattggtgatgagactaactgtcagaaagctttcagaagagtctgcttcataggcaataagctcctgaatagccaagtgtggcaggtagaagagaaggatcatctgcaagagagagttcagaggtagacttagcaggctctgaacagttaaagcaggctggcaaggaggggaatggagttgctcacttttgggaaccattatcaaattttgacancattaattcattaattcaatttgtatatagtgccccttctcatgccaggtactattctaggggctagggacaaagatacaaacaaaaggaaacaaagtgaaatataaaaccagttaaaagaatcagatttaagagggggaagtggaagtaatacattcaattttttttagcttgtgaagtttgacatgtagtggccagtgggaaatctagtactgcaactttggagaggattcaggtatttagatacatatttgggagtcattatgcaaaggaactagttattctaggaacccaaggataatgattgcaggaagaattaatgagaaggta

SEQ ID NO: 2991 - DNA, 661 bp, Homo sapiens
  misc_feature [331]..[331]: Chromosome 6, SNP identification no. = rs9321285
  misc_feature [331]..[331]: allele = t, in linkage disequilibrium with rs6933778, respectively
  misc_feature [331]..[331]: n is a, t, c or g
tttttttagcttgtgaagtttgacatgtagtggccagtgggaaatctagtactgcaactttggagaggattcaggtatttagatacatatttgggagtcattatgcaaaggaactagttattctaggaacccaaggataatgattgcaggaagaattaatgagaaggtatgctcttgtgaatttcttgaaatataaattttgaaacatatcctacaaacagttgagcaaaacaagtagaagttgcttttctacggggaacacaagctaaggcgtattaatgaagccatagaaatagtcactgggactagtcataaatatggtggttttctntcccttctgggaacatgtaggactacatatccttaacccttaacctggctttgtttaatgaactgtgggtggagtgatgtggatgacttctagctgtaagctttaaaagacagaatacagtttgccaattccctttctctcctgtgtgctcattaagacacataagacacatatttagatgaagctcttcgttaggctacatccccaagtgactacaggagcagagccactctgctgatctgtgctgaacctatgtagtatgagtgaaaaataagtaagtagcttattgtgctaagctactaagcattgggggttattaattactgcaat

SEQ ID NO: 2992 - DNA, 661 bp, Homo sapiens
  misc_feature [331]..[331]: Chromosome 6, SNP identification no. = rs2024599
  misc_feature [331]..[331]: allele = c, in linkage disequilibrium with rs6933778, respectively
  misc_feature [331]..[331]: n is a, t, c or g
atagcctttggctgggcacagtggcttacacctgtaatcctagacccttgggagcctgaggcaggtggatcacctgaggtcaagagtctgagatcagcctgaagaacatggtaaaaccctgtctctaataaaaatacaaaattagccaggcgtggtggtgcaagcctgaaatctcagctacttgggaggttgaggaaggagaactgagtgaacccgggagatgaaggttacaatgacctgtgattgcgccattgcactgcagcctgggtgacaagagtgaaactccgtctcaaaaataaaccaaaacaacattttatagccttccgttgcnctagtgcatttcctcatccacataaagattgcactctagttccacacctgcattccagtcatagggaaggggcaaagaggaaacaaaaggcaatcaatttccttttatggaagttacattgcagttggatatgtcactcctcctcacattgcattggtgagaacccactcacaaggtcacatctagcagcatgggtaccactaaatttggatgagaatgggatgggttctatcactaaaaagaagaaaggcagaatggataatgggacaattaacagtgtctgccacagggtacatagaatgtttaagaaactgaagtaaatgtagtatg

SEQ ID NO: 2993 - DNA, 661 bp, Homo sapiens
  misc_feature [331]..[331]: Chromosome 6, SNP identification no. = rs2024600
  misc_feature [331]..[331]: allele = c, in linkage disequilibrium with rs6933778, respectively
  misc_feature [331]..[331]: n is a, t, c or g
agcctgaagaacatggtaaaaccctgtctctaataaaaatacaaaattagccaggcgtggtggtgcaagcctgaaatctcagctacttgggaggttgaggaaggagaactgagtgaacccgggagatgaaggttacaatgacctgtgattgcgccattgcactgcagcctgggtgacaagagtgaaactccgtctcaaaaataaaccaaaacaacattttatagccttccgttgccctagtgcatttcctcatccacataaagattgcactctagttccacacctgcattccagtcatagggaaggggcaaagaggaaacaaaaggcaatnaatttccttttatggaagttacattgcagttggatatgtcactcctcctcacattgcattggtgagaacccactcacaaggtcacatctagcagcatgggtaccactaaatttggatgagaatgggatgggttctatcactaaaaagaagaaaggcagaatggataatgggacaattaacagtgtctgccacagggtacatagaatgtttaagaaactgaagtaaatgtagtatggctggagagtacagtgagacatggagagtgctcagaaagaggcagtagaggtaagggaggggaccaagattaaggaggcctgaaaacattgactt

SEQ ID NO: 2994 - DNA, 661 bp, Homo sapiens
  misc_feature [331]..[331]: Chromosome 6, SNP identification no. = rs2143774
  misc_feature [331]..[331]: allele = a, in linkage disequilibrium with rs6933778, respectively
  misc_feature [331]..[331]: n is a, t, c or g
agggaaggggcaaagaggaaacaaaaggcaatcaatttccttttatggaagttacattgcagttggatatgtcactcctcctcacattgcattggtgagaacccactcacaaggtcacatctagcagcatgggtaccactaaatttggatgagaatgggatgggttctatcactaaaaagaagaaaggcagaatggataatgggacaattaacagtgtctgccacagggtacatagaatgtttaagaaactgaagtaaatgtagtatggctggagagtacagtgagacatggagagtgctcagaaagaggcagtagaggtaagggaggggnccaagattaaggaggcctgaaaacattgacttagaggtaatggaaagcccctgaagagttttaagtggaagaataccacaatcagatttgcattttgaaagattctcttaatttcaggagggaggatagaatgaagatgaattaggcagtttttgcaggttccagagaagagctcgtggtcacttacactgggttaggggctatggagagaggaagaggaaattgaattccatagctatgtagaacacagaatcaagaatatcaaaagatgcagatgagaaatataaaggctgagggaaagggaaaagttaaagatgttcccagattttc

SEQ ID NO: 2995 - DNA, 661 bp, Homo sapiens
  misc_feature [331]..[331]: Chromosome 6, SNP identification no. = rs2206980
  misc_feature [331]..[331]: allele = g, in linkage disequilibrium with rs6933778, respectively
  misc_feature [331]..[331]: n is a, t, c or g
atgtagaacacagaatcaagaatatcaaaagatgcagatgagaaatataaaggctgagggaaagggaaaagttaaagatgttcccagattttctggctttcggattgacattctgtcattttctggagggaaaattctggcagaagaacaggtttacttgggaagagatgagtgccatattgagcatgctatgtttaatatgcctgtgagacatccaaatatagatatctagtagtcagttgtatctatgggcttgggttcaggagagagatctagggtagacctaaaaggctgggaattgttaacatatggatgatccttaaatccaagnaaggggatgaaatggcccaagaaaagttgcttaagaagaaaaaaagaactcttaagaacatcaacatttttaaaaaaggggaaagagggagaaaccaactatgagaattgaagaggaagtgccagagggaaggcgaaacacctggacaaaagtcacttcatggatgatgaaggaagcaagagtttcaaggagacagtgagcaaatgtacgaaaacttgctgagaagtaaagcaaaagtgcagaaaataaaaggaggttaaatatagtctgtacatcaagaggcagaaagcaaataaaactgctaggatgaaaaaactagtcaactagtca

SEQ ID NO: 2996 - DNA, 661 bp, Homo sapiens
  misc_feature [331]..[331]: Chromosome 6, SNP identification no. = rs2206981
  misc_feature [331]..[331]: allele = c, in linkage disequilibrium with rs6933778, respectively
  misc_feature [331]..[331]: n is a, t, c or g
aaggctgagggaaagggaaaagttaaagatgttcccagattttctggctttcggattgacattctgtcattttctggagggaaaattctggcagaagaacaggtttacttgggaagagatgagtgccatattgagcatgctatgtttaatatgcctgtgagacatccaaatatagatatctagtagtcagttgtatctatgggcttgggttcaggagagagatctagggtagacctaaaaggctgggaattgttaacatatggatgatccttaaatccaaggaaggggatgaaatggcccaagaaaagttgcttaagaagaaaaaaagaantcttaagaacatcaacatttttaaaaaaggggaaagagggagaaaccaactatgagaattgaagaggaagtgccagagggaaggcgaaacacctggacaaaagtcacttcatggatgatgaaggaagcaagagtttcaaggagacagtgagcaaatgtacgaaaacttgctgagaagtaaagcaaaagtgcagaaaataaaaggaggttaaatatagtctgtacatcaagaggcagaaagcaaataaaactgctaggatgaaaaaactagtcaactagtcagaataaaaagaaaaggagcatgcaataaaatgattgaagttagggcaaa

SEQ ID NO: 2997 - DNA, 661 bp, Homo sapiens
  misc_feature [331]..[331]: Chromosome 6, SNP identification no. = rs4897513
  misc_feature [331]..[331]: allele = g, in linkage disequilibrium with rs6933778, respectively
  misc_feature [331]..[331]: n is a, t, c or g
aacaagcattgcttagaaaatttgaatagcaaaataaataaataattatagaatgattaattccacaaagaaaccactccagttttaggtattcatacaaatgattaaatgtaaaacctttaagataaaaaatgttaggaaaaaattactgaaattaacttgaagcagttaaaaaaacttcaatcaatcagcataaaaaaatcagaatttttttaaaatttgaggactgaaaagtcttatttgttatatcttttaagtttgacaaagtactttcttgctacctaaactaatgcagaatatgaaaataaaaagttaaaacactttcaaaatngaaataaataaattggacatcatcaaaattaaaaattctttttacaacaaaggacactatcaagacttgaaaaacaacccactgaatggagaaagtatttccaaatcacgtatctgataaaagtctagtatccagaatatacaaatgactcttaccaacttgacaataaaaaaagaataactcaatttaccaatgaacaaagggtttgaacagacatttttccaaagaagatatacaaatggccaataattacaggaaaaagatactcagtatcattagtcactagaaaaatacaaataaaaaacaatgaaataacacttcacactcact

SEQ ID NO: 2998 - DNA, 661 bp, Homo sapiens
  misc_feature [331]..[331]: Chromosome 6, SNP identification no. = rs4897514
  misc_feature [331]..[331]: allele = t, in linkage disequilibrium with rs6933778, respectively
  misc_feature [331]..[331]: n is a, t, c or g
aaataattatagaatgattaattccacaaagaaaccactccagttttaggtattcatacaaatgattaaatgtaaaacctttaagataaaaaatgttaggaaaaaattactgaaattaacttgaagcagttaaaaaaacttcaatcaatcagcataaaaaaatcagaatttttttaaaatttgaggactgaaaagtcttatttgttatatcttttaagtttgacaaagtactttcttgctacctaaactaatgcagaatatgaaaataaaaagttaaaacactttcaaaatggaaataaataaattggacatcatcaaaattaaaaattcnttttacaacaaaggacactatcaagacttgaaaaacaacccactgaatggagaaagtatttccaaatcacgtatctgataaaagtctagtatccagaatatacaaatgactcttaccaacttgacaataaaaaaagaataactcaatttaccaatgaacaaagggtttgaacagacatttttccaaagaagatatacaaatggccaataattacaggaaaaagatactcagtatcattagtcactagaaaaatacaaataaaaaacaatgaaataacacttcacactcactaggatggctaaaatcatggacaataacaaatgttgacag

SEQ ID NO: 2999 - DNA, 661 bp, Homo sapiens
  misc_feature [331]..[331]: Chromosome 6, SNP identification no. = rs2327148
  misc_feature [331]..[331]: allele = g, in linkage disequilibrium with rs6933778, respectively
  misc_feature [331]..[331]: n is a, t, c or g
ataactcaatttaccaatgaacaaagggtttgaacagacatttttccaaagaagatatacaaatggccaataattacaggaaaaagatactcagtatcattagtcactagaaaaatacaaataaaaaacaatgaaataacacttcacactcactaggatggctaaaatcatggacaataacaaatgttgacaggaatgtgaagaaacgggaacccttatacattgctgatgtgattgtgaaatggtacagccatttggaaaacagtttgggagtttctcaaaaagttaaccatagagttaccatgttacctagcaattttaatcctaggtntatactcaagagagtttcaaatatatgtccacccacaaaaacttgtacatgaatgttcatagcagcattattcataaaagccaaacaatgaaaacaatccaagtgtccttcaactgatgaacagaaaaaatgtggtatattcgtacaatggaatatgattcagctatcaaaaggaatgaaatactgatgcatgctataacatgaatgaatctttaaaaagttatcctaagtggcagaagtcagttcaaaaggtgtatattttattattccatttatattaaatggcaggaattgacaaatccatagagacagaaagtagattattggttg

SEQ ID NO: 3000 - DNA, 661 bp, Homo sapiens
  misc_feature [331]..[331]: Chromosome 6, SNP identification no. = rs7452300
  misc_feature [331]..[331]: allele = t, in linkage disequilibrium with rs6933778, respectively
  misc_feature [331]..[331]: n is a, t, c or g
atgtactaaaacccactgaactgtacactttaaaagaatgaattttttggtatatgaattatactttcataaaatatacattatgatgtctcttatatatacatatgcagttgcctttactgatattctttatttcctgtgtggtttcatgtaactttctagtgttctttcattcagcctgaatggctccctttagtacttttgtagggcaggtctgctaatggtaattcctcttggtttttgtttatctggaaatggcttaatttcccttagctttcaaaggctagtttttctgaatatagaattcttggtgaattctttttctttcagnccttcaaatatgtcatcccatggccttgtggcctccatggttcctgatgagaaatcagctgttaattttagtattataatcccttgtacggatgattcatttttcttttgttgcatttacattctctctgtgtattttaaaggtttcactatgatgtatctatgtggggatctctttgtgtttatcttatgtggcgttaattgagcttcttagatgtgtagttgtttttaattatctttggatagttttcagccattattttttaaaataatctttctattcctttctctctctctctcttctcctctttgacttcctttatgtgtatgt

SEQ ID NO: 3001 - DNA, 661 bp, Homo sapiens
  misc_feature [331]..[331]: Chromosome 6, SNP identification no. = rs2143778
  misc_feature [331]..[331]: allele = g, in linkage disequilibrium with rs6933778, respectively
  misc_feature [331]..[331]: n is a, t, c or g
cccatggccttgtggcctccatggttcctgatgagaaatcagctgttaattttagtattataatcccttgtacggatgattcatttttcttttgttgcatttacattctctctgtgtattttaaaggtttcactatgatgtatctatgtggggatctctttgtgtttatcttatgtggcgttaattgagcttcttagatgtgtagttgtttttaattatctttggatagttttcagccattattttttaaaataatctttctattcctttctctctctctctcttctcctctttgacttcctttatgtgtatgttggtaaacttaatgatntcccatgggtctctgaggcgctatcctttttttctctattctttttttttttgcttgtatcttagactagatcatctcaattgacatatcttcaatttttcttattctttcttctgctaattcaatatgctgttgaactcttctactaaattttaatttcagttcttttatactttgaaatagctagtttttaaaatagtttctatgtattgatatttgatgagacatcataattacctttaattccttagacatagtttctgttagttctttgaacatatttaaactctttgtctcgtaagtccaacatctgggtttcctcagagacag

SEQ ID NO: 3002 - DNA, 661 bp, Homo sapiens
  misc_feature [331]..[331]: Chromosome 6, SNP identification no. = rs2143782
  misc_feature [331]..[331]: allele = c, in linkage disequilibrium with rs6933778, respectively
  misc_feature [331]..[331]: n is a, t, c or g
ttgagcttcttagatgtgtagttgtttttaattatctttggatagttttcagccattattttttaaaataatctttctattcctttctctctctctctcttctcctctttgacttcctttatgtgtatgttggtaaacttaatgatgtcccatgggtctctgaggcgctatcctttttttctctattctttttttttttgcttgtatcttagactagatcatctcaattgacatatcttcaatttttcttattctttcttctgctaattcaatatgctgttgaactcttctactaaattttaatttcagttcttttatactttgaaatagntagtttttaaaatagtttctatgtattgatatttgatgagacatcataattacctttaattccttagacatagtttctgttagttctttgaacatatttaaactctttgtctcgtaagtccaacatctgggtttcctcagagacagtctctattggctgtttttcccctttttgggggccatatcgtcatgcttctttgcatgtctcattttttgttgttcttgaaaactggacactttacataataaaatgtagcgactttggtaatcagattccccttctcccagagtggggttgtttgtgactgttattgttgctgctgctgtttgt

SEQ ID NO: 3003 - DNA, 661 bp, Homo sapiens
  misc_feature [331]..[331]: Chromosome 6, SNP identification no. = rs7382142
  misc_feature [331]..[331]: allele = c, in linkage disequilibrium with rs6933778, respectively
  misc_feature [331]..[331]: n is a, t, c or g
tttttaaaatagtttctatgtattgatatttgatgagacatcataattacctttaattccttagacatagtttctgttagttctttgaacatatttaaactctttgtctcgtaagtccaacatctgggtttcctcagagacagtctctattggctgtttttcccctttttgggggccatatcgtcatgcttctttgcatgtctcattttttgttgttcttgaaaactggacactttacataataaaatgtagcgactttggtaatcagattccccttctcccagagtggggttgtttgtgactgttattgttgctgctgctgtttgtttgnttagtgtcttttctacataattctataaggtctatattttttgcatgtaactactgaagtctctatagttagcttagtggttgggtaatggttggatagagatttccttaaggaatttgaaccagtaagtcttccaacctttgccaaatggctacggtgtatgttgaggcatgccttcagtgatctggcaggcaatttacaactttgctttaatcttcctaaagatgaactttagcctctctaaaaccaaattttgcacggagcctcaagatcagcctaaggtgagaaactggagccttctcaattctttcctgggcatgcacacaaccc

SEQ ID NO: 3004 - DNA, 661 bp, Homo sapiens
  misc_feature [331]..[331]: Chromosome 6, SNP identification no. = rs2143783
  misc_feature [331]..[331]: allele = c, in linkage disequilibrium with rs6933778, respectively
  misc_feature [331]..[331]: n is a, t, c or g
cactttacataataaaatgtagcgactttggtaatcagattccccttctcccagagtggggttgtttgtgactgttattgttgctgctgctgtttgtttgcttagtgtcttttctacataattctataaggtctatattttttgcatgtaactactgaagtctctatagttagcttagtggttgggtaatggttggatagagatttccttaaggaatttgaaccagtaagtcttccaacctttgccaaatggctacggtgtatgttgaggcatgccttcagtgatctggcaggcaatttacaactttgctttaatcttcctaaagatgaantttagcctctctaaaaccaaattttgcacggagcctcaagatcagcctaaggtgagaaactggagccttctcaattctttcctgggcatgcacacaaccctaagcatgcatgtggcctcctagaatctcagaaatatgttggaatttttcaaagccctttatggatatctcactccccagtttttccttttaagatttttggtcagcctcatgctgcctccagcagtggtgatgttaaaccattgctattcattgatttttacaaatgctctggtgaaaaggttgtttgcatggaacatgctctcagtgaggtaaaataaagacaagctt

SEQ ID NO: 3005 - DNA, 661 bp, Homo sapiens
  misc_feature [331]..[331]: Chromosome 6, SNP identification no. = rs7753432
  misc_feature [331]..[331]: allele = a, in linkage disequilibrium with rs6933778, respectively
  misc_feature [331]..[331]: n is a, t, c or g
agctccaaatccattctgcccattgccgtggctgctaggctgctggttttcatagctactatagtgaaaggctataggttttcaaggctaccatggagctatagagcaagggatggggacagggtcactccacaaaggtcactgctcttactgaggttcatctgatgttcttgaataaacactccttagattgttgcaagcctttggttaattgccagaattctgaattttgacaatttttgccagtgatctccttgtttttacaaaggggcagattttgagaagtactaactttaccattttgcaagtgcttctcctagtaagtattttnagctgaatggaaaggaaagcacaacatatcaaatgttttgggattctgctaaagcaataattaggggaaacgttatagcactcaccacctctgttagaaaataagacaggattcaaaaccatgacctcagctctcaccttaaaaaactagaaaaagaagattaatgaaacacaaagtaagcagaagaaagaaaatagtaacaatcagagcagaaatcaatgaaatagaagacagataaacaacacagaaagtaaatgcaacacaaagctggtacattgaggagataaataaaattgatgtacctctagacagattaatcagtacggggtt

SEQ ID NO: 3006 - DNA, 661 bp, Homo sapiens
  misc_feature [331]..[331]: Chromosome 6, SNP identification no. = rs7757400
  misc_feature [331]..[331]: allele = a, in linkage disequilibrium with rs6933778, respectively
  misc_feature [331]..[331]: n is a, t, c or g
cattctgcccattgccgtggctgctaggctgctggttttcatagctactatagtgaaaggctataggttttcaaggctaccatggagctatagagcaagggatggggacagggtcactccacaaaggtcactgctcttactgaggttcatctgatgttcttgaataaacactccttagattgttgcaagcctttggttaattgccagaattctgaattttgacaatttttgccagtgatctccttgtttttacaaaggggcagattttgagaagtactaactttaccattttgcaagtgcttctcctagtaagtattttaagctgaatggnaaggaaagcacaacatatcaaatgttttgggattctgctaaagcaataattaggggaaacgttatagcactcaccacctctgttagaaaataagacaggattcaaaaccatgacctcagctctcaccttaaaaaactagaaaaagaagattaatgaaacacaaagtaagcagaagaaagaaaatagtaacaatcagagcagaaatcaatgaaatagaagacagataaacaacacagaaagtaaatgcaacacaaagctggtacattgaggagataaataaaattgatgtacctctagacagattaatcagtacggggttggggtgtgata

SEQ ID NO: 3007 - DNA, 661 bp, Homo sapiens
  misc_feature [331]..[331]: Chromosome 6, SNP identification no. = rs2092601
  misc_feature [331]..[331]: allele = a, in linkage disequilibrium with rs6933778, respectively
  misc_feature [331]..[331]: n is a, t, c or g
gcttaaaatgaatcataggcctaatgtaaaatgcaaaactataaaacctctgggaggtaacataggagtcaatctaggtgaacttgggtctagcaatgggttcttagatatactgccaaaagcataatccatgaaagaaaaaaaactgataagttggacttcattaaaatgtaaaacttctgccacgtgaaagacacagctaagagaatgaaaaggcaaattacagactgggagaaaatctttgcaaaacacacgtgtgacataggacttatatccaaaacacacagagaactctgaaaactcaacaataagaaaatgaatactcaatttnacaaaaatgggcaaaagatcagaagacacctcaagaaaaaagatattcaggtagcaaataagcatatgcaaaaatattatgaaaataagctcaatctcatatgtcaattgggaattgcatgttttttaaaaatgagatgccactgtacacctatggaaatagcgaaaatctaaagcactgatgaagtatctcagaaaaaaataactttcaatgttaaaaaatggtcatggcagcatcatcatagtgaaaaaacaggaaataatcaaaatgtaggcagaagactagctcaatctattgaagtatattcacacaatggaatattatagagca

SEQ ID NO: 3008 - DNA, 661 bp, Homo sapiens
  misc_feature [331]..[331]: Chromosome 6, SNP identification no. = rs6569738
  misc_feature [331]..[331]: allele = t, in linkage disequilibrium with rs6933778, respectively
  misc_feature [331]..[331]: n is a, t, c or g
gaagtatggccactgggattggccaagacatagctattgttacagcataccactaagttagcttttcaattttgtctgcctattaagctaggttacagttcatccaccaggactcaaatacagaagtacagagtccttctcaggccatatttaggttgctttaacattctcagcatcatgaaggccaatggttgctgatggctctctatgggcctggcacaaagctgagtcctttatatgtttctcctattcaatcttcagagcactttgaggtcggtgccaccattatccccattttgcaatgaagcttagagccttagaggttaaagantacattgctgtatccagagcctgacttttttcaccggcactataaataaacaaatacacaatgtaagtctgtgtaatataacagatatacagaggatgtggagaaatttagtttctaccagtcctattagtagcatagttgattccttccaatgaaaccacctttgcaaaaattatgactgagagagaaatttgacatagctgactccatcctgcttctaacctcagaagctgtctttgctcattcctgggtttaggccaagctaactatggagaaatttagcttgtagtttaactttgaagcaaggatgataatagtccctccccaaac

SEQ ID NO: 3009 - DNA, 661 bp, Homo sapiens
  misc_feature [331]..[331]: Chromosome 6, SNP identification no. = rs6569739
  misc_feature [331]..[331]: allele = a, in linkage disequilibrium with rs6933778, respectively
  misc_feature [331]..[331]: n is a, t, c or g
gattggccaagacatagctattgttacagcataccactaagttagcttttcaattttgtctgcctattaagctaggttacagttcatccaccaggactcaaatacagaagtacagagtccttctcaggccatatttaggttgctttaacattctcagcatcatgaaggccaatggttgctgatggctctctatgggcctggcacaaagctgagtcctttatatgtttctcctattcaatcttcagagcactttgaggtcggtgccaccattatccccattttgcaatgaagcttagagccttagaggttaaagattacattgctgtatccngagcctgacttttttcaccggcactataaataaacaaatacacaatgtaagtctgtgtaatataacagatatacagaggatgtggagaaatttagtttctaccagtcctattagtagcatagttgattccttccaatgaaaccacctttgcaaaaattatgactgagagagaaatttgacatagctgactccatcctgcttctaacctcagaagctgtctttgctcattcctgggtttaggccaagctaactatggagaaatttagcttgtagtttaactttgaagcaaggatgataatagtccctccccaaactgaccccctctgggga

SEQ ID NO: 3010 - DNA, 661 bp, Homo sapiens
  misc_feature [331]..[331]: Chromosome 6, SNP identification no. = rs2143776
  misc_feature [331]..[331]: allele = t, in linkage disequilibrium with rs6933778, respectively
  misc_feature [331]..[331]: n is a, t, c or g
cagcagattcctggatctcatccattccattttagaaactgagaatgggttaggagagccaaactgaagttcattgtctacaaatctcagtaggttgtggggaccacttgtgagattacctctcctacacttccaaatgtgaactgggcaatggcctctgcccttcatgtccactcttccctgcctcttccttccatgactttggccagagaggtgggcaaagcatcacatctcaccttagatttgcattacttttcctttctttgtcttcttacaagtcaccagaaatctgatgggatgggctttctctccttcatgcttaacattctcntacattaaatgctccttctgactgtggtcatatttgacctgttcccttccctggagctattgtcagctgttgaggtaaggtgggggagaatcagcctcctgataaagaaggtatcaggatctgaagctatagatcaggatgaagtggattcttactgctggaaaaccataaaggctaagatagccgaatatgcaaccataagcaaaagactattctagatctgtacacacacacacacacacacacacacacacacacaaagactctttagaccactatctgttttatttagattttaagggtaactatgctccttgttaactgagagtc

SEQ ID NO: 3011 - DNA, 661 bp, Homo sapiens
  EYA4
  misc_feature [331]..[331]: Chromosome 6, SNP identification no. = rs1336533
  misc_feature [331]..[331]: allele = c, t
  misc_feature [331]..[331]: n is a, t, c or g
gattccatgcacacttttgttaatgggctcagattccccagaattcttttatgtggttacattgtagatggactgtctgcatagtcttgtcctcttgaatgatttatgtagaggttaaaaatacatatatatttggtctggttcttagaatctacgcataagattaaatgaatctcagcaagttcagttttggaaaaaaaaattaaatttattattacaaaggcaatctagtagaggatgtagattctcgagccagaatgcttaatttgaaacatggatttgccacttgctagctatacagtgttggacaagttatttaatctctttgtgncttcttggtttccctaaccacatacaggatgataataacaatatctacctcatatgtttccatgaggtttaaatggtttacactgtcaaagcttttaggacagtgcctggcgcgactaagtactcagtgagtgttagtcatgatgtcatgattattcatggtattcaccagacaagaatatgttctcatttgtgtatgatttaggattaaatttgggactaatattgagtggttcaatgctaattttgataaggctcatggaggtgtgtggtcacttttagtggagagtaactttaattcctttttacatagtgaaaaaaagagttcacc

SEQ ID NO: 3012 - DNA, 661 bp, Homo sapiens
  EYA4
  misc_feature [331]..[331]: Chromosome 6, SNP identification no. = rs9389077
  misc_feature [331]..[331]: allele = g, in linkage disequilibrium with rs1336533, respectively
  misc_feature [331]..[331]: n is a, t, c or g
tttgtcgtcactaggccttcatgatatacagcctttatgatatgtcttcctgaactctgaactcttgtaggaaatggattctatcatataaaactcagtatcctccaaatatgcctcagatgaagtagatttcagataaatatttgtaagttaatgagataattttatcctgtatgaaaataattctgaaatggaagacagcatgtagatacatcgtaaatattgttcactctatgtggacatctctccatggcaaaagaagactcagacaaaccaaactattatactaccaccaaaaaagtctgtgcaattaaaaaacagtgcaacacantgcaacaatgcatccagccatgatggtctgaataggtgcaatctcattaaggcagaacacccccatgactgcttcatcttgcatctgtggtgcctagcatggcagccagtacatggtgggcattaaagatagacatttatgaatgaatgaataagacgccccacatttaaaactcagaaaatatgttttatgctattagttttgcttgaggtcccatttagtatgtgttatgtgtgaaggtgggaatagtggcattgtaaaatggaaggagtacatttttgaggtgattagccatagaggaaaagctgtaggaacctatttgggcaaatg

SEQ ID NO: 3013 - DNA, 661 bp, Homo sapiens
  EYA4
  misc_feature [331]..[331]: Chromosome 6, SNP identification no. = rs9402510
  misc_feature [331]..[331]: allele = a, in linkage disequilibrium with rs1336533, respectively
  misc_feature [331]..[331]: n is a, t, c or g
atcccaaaggagagatgtgttttcagatggcacttctcatctctactcagcctttttttggagggtgagtggctagatatgggcgatggggaacacaaagggaaatgctaagacacaaggggttttcatgagtggtaaaatgactggagggtttgcaggaggatcagggaggagaaagagtaaggaaaggggaaggagagagggaacagggaaaaatctaggaggggtggactaagatattatagtttcaaatatcagtatttatgcaaaatacacaaaaatatatgctagtactttaaaatggcacctattaatggaaaattaaaaaccngtgttacagttagtagtagtgtaaacacattttcaactttactagataatgtaatatttctttccaaattggctgtaccaatttacattcccaacagcagtgagagaattacccattttaccacactctagttaacgtttgacctttatttgattttgtaatgtttgccagcctgataggtttgatacaatgtttcattgttgtttaaagttataattcattcactgattattaggactgtagtgaatacttgtccagtgcatttttataacttttataatttttaaaataaattttattacaaaggtagtatagttttataatatcatt

SEQ ID NO: 3014 - DNA, 661 bp, Homo sapiens
  EYA4
  misc_feature [331]..[331]: Chromosome 6, SNP identification no. = rs3777849
  misc_feature [331]..[331]: allele = a, in linkage disequilibrium with rs1336533, respectively
  misc_feature [331]..[331]: n is a, t, c or g
ttcaaatcttttcctaactactgagttcaaaacctgaattatttttgtaatgtccctctgttcacatttgattagtttccaagttctggttattctgcttcctaaatgcccccactttgttgccgctatgactgctttagtttagctctaactatctcttagctcagcacttagtcatctatcttgcctccttgactggctttcccctctctaattcagcctccacatggtcatcacacacttttctgaagtgtaattttgaccatgctgctttgttgcttctacctctccatttgctcctcattgcctgtaggctaaaattcagacttcntgggatagcactgaagatgctctatgcttttcacgctttctccctgacctctatcatgcagaaatatttaactgcttgcaggaacgtgaacacacgatgccgtttcccatctccatgccattgaataaacctgtccatccatcttctggaatgtttcgccaactttgaccaggagaaaactcagaactcagatttgaagccttcttttatctcctgcatacatgtacatttacagaaaactcagtaaagttaaccactcctcatctatgccaagtgtctacaacactgcccttgcactgttgccagatcttccatgctagactgtgacca

SEQ ID NO: 3015 - DNA, 661 bp, Homo sapiens
  EYA4
  misc_feature [331]..[331]: Chromosome 6, SNP identification no. = rs1336534
  misc_feature [331]..[331]: allele = t, in linkage disequilibrium with rs1336533, respectively
  misc_feature [331]..[331]: n is a, t, c or g
ggaatcaggaacatgaatttaagtctgtgatccaccacctagaaaaagttaatgggtgtgtgtagatgggtttccaaatatcttctcgggtttacagggctaactaataactaaataacactgagactcttccatagacaggcattctgtagtcttttcctttctctgccaagacattctgtatctttatgaggttactcaacccattcagtttgagagcaaggaagttagcacctgccacgagggatcagaatgtgaaatgtgatgagagggccctgtgataagtccctgaccttagcaaacaaaaataaaaccttgaaaaaaaaagacnaacatgcagtaatatacaaatcagagtatatttgtctgtccctgaataggagccattaaagttccactccatagcaagcaatggttgaagttgtgtacgattcatgtaacagcagtgtcaggagatgtcagggaactccctcactgccccagcttttgatactataacatgatagtctccatgaaaaaaaaaaaaaaagtcaaccagccgtcttagtgataggaacttgggcccatttctcatctggtgtaatacttcacaaagctgatccaaacacaatgcagcgccctgaaatcagcaggagctcagccctgtgttcagtgccaaaga

SEQ ID NO: 3016 - DNA, 661 bp, Homo sapiens
  EYA4
  misc_feature [331]..[331]: Chromosome 6, SNP identification no. = rs9375963
  misc_feature [331]..[331]: allele = c, in linkage disequilibrium with rs1336533, respectively
  misc_feature [331]..[331]: n is a, t, c or g
cagcagaatcagaatctaacagacaggctgaaacaatggactcaagtccaacaagatggcatttaggagaaacacatgaaaagctgttcactcgggtcccaaatgccaactgcatgtgtagtgagcgactgggaggacacagggctctcaagcatcacatgggacaaagacttgagaatttcactggctgggtttaggcatgaattaggactgcacagtgtctgaggacaaagctaatgtactcttcagtctacactgacaagtgagagttgtaatagccttgccatattttggaccacaactgtgtgactatggggaccactgttaaagnagaatcctggagatcttatggaagagaatgctaggaaagtaaaagagtttgagatggactgagtggactgagggaattggagatgccctccctgagagagaaaaagctcttgggcaggacaggtcattgatgtgtgaaagactgttatatgaaagaaggtttagacttgacccatgacaataaatgaattttcttggaccaaagtttcagggaagccccggatagaaaactttctgatagtataagttatctgaaaatgaaagggctgcctcttaagaaaatgattttcttgacactacaagttttcaaatagacaaaccaggctgtttt

SEQ ID NO: 3017 - DNA, 661 bp, Homo sapiens
  EYA4
  misc_feature [331]..[331]: Chromosome 6, SNP identification no. = rs10782249
  misc_feature [331]..[331]: allele = c, in linkage disequilibrium with rs1336533, respectively
  misc_feature [331]..[331]: n is a, t, c or g
gccctccctgagagagaaaaagctcttgggcaggacaggtcattgatgtgtgaaagactgttatatgaaagaaggtttagacttgacccatgacaataaatgaattttcttggaccaaagtttcagggaagccccggatagaaaactttctgatagtataagttatctgaaaatgaaagggctgcctcttaagaaaatgattttcttgacactacaagttttcaaatagacaaaccaggctgttttattgtctgtgttgtagaagtgattgtagtaataaaatttatgaaggatgcactgtaggccaacctttggatacttttttttgtgngatcttatttaattcacacattagccttccagaggatattattatctccaatattgagactaaggtcccatgactggtaaatgaggcagagtttaaaattcaggttttagttgacagtagagactcttaacactgctctcatagccttaagcacaatattccattttgcttttgaggacatttaatgtcccttcagaactggaaatctgatcattttaataggttaccaccttttttttgtacattatatcaatgctttgctcttgttagtacaacattgggaaacctagatttgtttatcctgtgaacagtttgatctttactggtaga

SEQ ID NO: 3018 - DNA, 661 bp, Homo sapiens
  EYA4
  misc_feature [331]..[331]: Chromosome 6, SNP identification no. = rs9373053
  misc_feature [331]..[331]: allele = g, in linkage disequilibrium with rs1336533, respectively
  misc_feature [331]..[331]: n is a, t, c or g
agtgtgttcatggctttatttgctgttagtccgaggcctgaggtcaccctggcagatgggtcacttgcactgcaagcactcatgctggcctcagggacagggatgaggtcactggcacatttcaagaacagcttcctttctttatgcatacaccactttcctggtccttgttaagggtctccttcctcttgcggttcccatctctgcagctgaccccagttctgactgtgtctggggaaatgggttggtgagggcctccttctgggactatctgtccacctgatcagtgatatagacactgtgccgcggagaggagccacatctcccagcnagcctgccagcagagtaattggctcagggttacaagttgtgacaagtggtttttggatcctaatctgaaatatgtcggtttaacatgacctggcattgttacctgatgtttttaaatgcccgtactttttccagaaagtgggaactgatacacagcagtggcatgtcctactaattttcataagatctaaattgatcaggatgctttattactttttttattccacagtatatttttcctctttgactctaaagtgcatgtgcacgcgtgtacacacacacacacagacacaaacatgtgtgcacacacacacaccccccctcactcatt

SEQ ID NO: 3019 - DNA, 661 bp, Homo sapiens
  EYA4
  misc_feature [331]..[331]: Chromosome 6, SNP identification no. = rs1012605
  misc_feature [331]..[331]: allele = c, in linkage disequilibrium with rs1336533, respectively
  misc_feature [331]..[331]: n is a, t, c or g
cgtggtggcacgtgcctataatcccagctactcaggaagctgaggcaggagaattgcttgaactcggaaggcggaggttgcagtgagccaagatcgtgccgttgcactccagctctgggcgacagagcaagactccgtcttgaggaaaaaaaaaaaaaaagaaatttccacatgcatttccatcagagaactaattccatctccccttacctagccccttgctctcctgcctagcctgtgggaatctttgaagattctttgtattctaagaactgtcccaagaacaaagtagatgctcaagcaatgtttgctgaactagactacatttgantccatgtaaccaaatgactttatctacatttttttctattccttttattcattagcacccactaaatatactccactattctaggaatagggaaaaaaattcatgaacaaattagaaaacaatcctaccctgatggtgccttacagtcttaattacgtgaatagaagctattgttgttattcttacttttcaggtaaggagaattgaggcttttgtcacataggaagaaaaaattatgagcaagtcttgcccttaaaatcattctgatggtcaaatgcaaatttgctattttggtggactcttgagaatgtgggaaatagacccatgtcc

SEQ ID NO: 3020 - DNA, 661 bp, Homo sapiens
  EYA4
  misc_feature [331]..[331]: Chromosome 6, SNP identification no. = rs760861
  misc_feature [331]..[331]: allele = c, in linkage disequilibrium with rs1336533, respectively
  misc_feature [331]..[331]: n is a, t, c or g
atgtcttctctttacaaatataatcagtactatcctgtcccaatgccttacccagacattcacaactctccattcagctttatcttcaagtaatcacctagtatacagtttcttgtatcagaaatgattattgtactattgtcacaatttccccttcacaattttagcttgtacagcatctttcttgtctgatagctcctgaaaaccatcttaatcaatgtttaaatacctcagaaatgctactttctccaaacagctttttctggtcctcaaaaccagaagtgacctggtcatactatcatatttttgttatattatttttaccttcctntgcagcacttttcacactctgtcttaacttattgtcatttgtgtacacgttcttctagaaaacaaatgaaaaaaaagaagctgccacaggatgtctgtgataacaagattctttttcatttatctttgttaactcctgaagtgcccttcctattaaagatgcaaataaacagctgtcaaactcagtagcttccaaactactagattgttaattgaataaaaaaagtaagcacctcaaatatgtgtacatatttatttaggtgtcatttatatgtgctaattaattatgtacatttttatataggcacattatagaatatattcaaaagca

SEQ ID NO: 3021 - DNA, 661 bp, Homo sapiens
  EYA4
  misc_feature [331]..[331]: Chromosome 6, SNP identification no. = rs6907872
  misc_feature [331]..[331]: allele = t, in linkage disequilibrium with rs1336533, respectively
  misc_feature [331]..[331]: n is a, t, c or g
ttgaactggagaggcattgactgaagttataattttttagggttttttttagttaatatttttatttagtactggcaaggtccttatacatgtaactttggtaaattcactcattagttctagtagtttgggggtttggggtatgaatttcccagaattttctctataaacaattaaatcatttgtgaattaaagttttttctttctaaactttgcttattttatttatctttgtcttgtactggctaagattgctagtagaatattgtggtgaagtaggaaaagcagatgtctttggcttgctaccgaaataattcattatttcatcacngaatatgatataagctatagacttttcaagagtgcttttatcagacagaggaaaaatacttcttttcttagtttgccaagaatttgtatcatgaatggatgatgaatattgtcaaattttttttgcactcatggaaataatattatgttaatatattgaattacattgatttccacatgtgaaatcagctttacattactggcataaagcgcacttggtcatgatttttttctattgctgggtttgatttgagaatattttgttaaatattttctcatctatgtttataagaaatatatatccatattttcttttcttaaaattgttcct

SEQ ID NO: 3022 - DNA, 661 bp, Homo sapiens
  EYA4
  misc_feature [331]..[331]: Chromosome 6, SNP identification no. = rs9375964
  misc_feature [331]..[331]: allele = a, in linkage disequilibrium with rs1336533, respectively
  misc_feature [331]..[331]: n is a, t, c or g
ctcatggaaataatattatgttaatatattgaattacattgatttccacatgtgaaatcagctttacattactggcataaagcgcacttggtcatgatttttttctattgctgggtttgatttgagaatattttgttaaatattttctcatctatgtttataagaaatatatatccatattttcttttcttaaaattgttcctttctggttttggggtcagggtaattctggtctcctaccatggaatgaaaagtgtttccttctattttttctgaaagaatttattaaaaaaattgttactaaaaaaaatttttttttaaataacagtancaaaaaaagtttgctagtgtttattaattgaaccatatggccctggaggttttttgataaatatttaattataaattaagttttttaatcaatgcaggactatttagattttctatgttaattggatcaattttaataaatgtgtctttcaggaaattcactgattttgtgtgtctttgaattaattggcataatatagtttataatacttccttattaccctttcaaaatcattggtatctctcatgatcatcttttggatttgtaaattttctctattgttcacagattttgtttcaattatttctactctttattgtttccttctac

SEQ ID NO: 3023 - DNA, 661 bp, Homo sapiens
  EYA4
  misc_feature [331]..[331]: Chromosome 6, SNP identification no. = rs9389078
  misc_feature [331]..[331]: allele = g, in linkage disequilibrium with rs1336533, respectively
  misc_feature [331]..[331]: n is a, t, c or g
gttcgagtgtgccatcttgctttgtattttccatttttcacatatattctttgtttgcttccctttttttggcttcttggggttaattgaattctttaaaatgctgctttaatcgttctgttgggtttttgttatacctgatggtatttttcttaacatttaatgctagagattactccatgtaccctaaacttaacctcttatccaagtttaatataacacttcatgccaaatgaaagaaccttgaaaaatataatttcaccccactttttgctgttgttgtcacatattatataagtccctgtatacagtgcaattatttttgcttcantaggctgtctttcatgaattaagagaaaaataaaagataatcttttatatttacctatatatttacatttatgttattcttaattctttcctgtaggtctgagttttcctctggtatcttttctttgagctgaaggtcttcctttagtatttgttatagttcaggttgttggtgagaaattctctcaacttttattgatctttatgtttctttcttccatgaaagcatgtgtagcttctttgggctactgcacagttctttttcctagtttcctttcctttttcttttttttttttttcttttgaaacagagtctcgctctgtcgctccg

SEQ ID NO: 3024 - DNA, 661 bp, Homo sapiens
  EYA4
  misc_feature [331]..[331]: Chromosome 6, SNP identification no. = rs10872405
  misc_feature [331]..[331]: allele = t, in linkage disequilibrium with rs1336533, respectively
  misc_feature [331]..[331]: n is a, t, c or g
gacaacaataatagctattacttcagatattctgctttattatttttataaaatgtattcaacttgtcagaaaatatggtccaatttttatatcagaatgtgtgtttgtagagattatgtatacacttatatatagactgtattttaaattattcacaatttgaaattttgtagatccatctagccaataaatttagaattatatgacatttaatttagatattagcatttgccacatcatattttcttttaaattttaaataaatatctgtgaaattgatacacctcttcccatttattttagaataacgatgcaatctaaagttttctntgtaaggttgtgtgcattgcaacttacctgtatttaataatgttttacaccagttcccttgtagattaacattttccttgtttatgatgtttatttgtctctaaacatgcatctgtaatttcagctaattaattatgcaattgcaaatgtatagaatatttagtgatgaaaactagagtaaggtacatttaaaccttaaattgggtacaaataataaaatttaaaaactcaagcactctaggaacagactggtgaagttcactaatcatcatatgtatatatttgactgaactaaaacagacctgataaactaaaatgttgaagtcatac

SEQ ID NO: 3025 - DNA, 661 bp, Homo sapiens
  EYA4
  misc_feature [331]..[331]: Chromosome 6, SNP identification no. = rs6912844
  misc_feature [331]..[331]: allele = g, in linkage disequilibrium with rs1336533, respectively
  misc_feature [331]..[331]: n is a, t, c or g
aaactacttcaatatgctcattatttgtatttgtatagttttagttttaatgtttttcaattttatacttaaatatacttttcatacttaaaattatgttgctagaatttagatactcttaattctatagcagggtctttttctctaaagggccagatagtaagtatttttggctttgtaggccacatgtctgtgtttcagctgctcagctctgccatcatagtgcaaaagcaacatagaaaatatgtaaatgaataagcatggctatggtccaataaaacttcatgggccctaaaatttaaatttcatataattttcatgtgtcatgaantattgtaattttgacaactttttaaacatttaatatgtaaaaaaatgttcttagcttactggctgtggtctgttctcaaatagtgtttaacacaagcaacattataatagtgaatatgtgcaataaatagtaatttacctctgatctcaaccagaaacatttttctaagtggtaagcatcaggctttcctggttcttaatgtcagtgttaaaactcgtgagtccatgggagaagaacaaggagttgtgcgtcagggccactgtggatctggatcttagcactacacatactggctgtgtcaccttgaacaagttacttaagctctctgag

SEQ ID NO: 3026 - DNA, 661 bp, Homo sapiens
  EYA4
  misc_feature [331]..[331]: Chromosome 6, SNP identification no. = rs9399065
  misc_feature [331]..[331]: allele = t, in linkage disequilibrium with rs1336533, respectively
  misc_feature [331]..[331]: n is a, t, c or g
ttgactaaaagcaaacctttaaaattttaatgagagatgtttccagtataatgaattagaccaaaaactcactctctccttcttctttctccttttgacctccccaaactttcaaattgaagagattataatcaaaatcaatactaagcttttgaaattgggtctcaaagttgaaattcaaagtaacaaaactaatcttcatgtctggcttctagaccagtttcgttagacacagctcacattctgccacctccattcgcaagtaaaatctatattacaattagtataataaagctacttttgcaaatattgttcgtagatatagatatgnataaataggaatttagctgcaagtagaagtcagaagctctgataaactgtttcttagttttgctgaaggctttgggccatgactttttgtcataaatgttagaactcaattgtaaacattgcgtgaaatggagtagccttgatacccatctagattatactctgcattatcttcatacagacaaaaggaattcttgattagctagtgctgcctgagaggcagtatggtttaagagtttggattctgaacacacactacttggtctcaaattctagctcttacaagctttgtgactggggacgttatttaacctttttgtgcctcagtttc

SEQ ID NO: 3027 - DNA, 661 bp, Homo sapiens
  EYA4
  misc_feature [331]..[331]: Chromosome 6, SNP identification no. = rs9373054
  misc_feature [331]..[331]: allele = t, in linkage disequilibrium with rs1336533, respectively
  misc_feature [331]..[331]: n is a, t, c or g
tcaatactaagcttttgaaattgggtctcaaagttgaaattcaaagtaacaaaactaatcttcatgtctggcttctagaccagtttcgttagacacagctcacattctgccacctccattcgcaagtaaaatctatattacaattagtataataaagctacttttgcaaatattgttcgtagatatagatatgcataaataggaatttagctgcaagtagaagtcagaagctctgataaactgtttcttagttttgctgaaggctttgggccatgactttttgtcataaatgttagaactcaattgtaaacattgcgtgaaatggagtagncttgatacccatctagattatactctgcattatcttcatacagacaaaaggaattcttgattagctagtgctgcctgagaggcagtatggtttaagagtttggattctgaacacacactacttggtctcaaattctagctcttacaagctttgtgactggggacgttatttaacctttttgtgcctcagtttccttatctgaaaaataaagatgatgatattatctactgactgttgagaggagtaaatcagtaggtgtaaaggacaagagaagtgcctggaatgtatcaagttcattttaagggtgtgctgttactgttacctaatttc

SEQ ID NO: 3028 - DNA, 661 bp, Homo sapiens
  EYA4
  misc_feature [331]..[331]: Chromosome 6, SNP identification no. = rs10872406
  misc_feature [331]..[331]: allele = t, in linkage disequilibrium with rs1336533, respectively
  misc_feature [331]..[331]: n is a, t, c or g
tcaagttcattttaagggtgtgctgttactgttacctaatttcaaatttgctacttcttgatgtcttttaaaatatcccatgaggaagaaatgggaaacatgccttagtatcctattccagtattttgcagtttttattttcagtgaagtatttttaattattctatctaggagataattgcattctcatcatgctttgggcctttgagaagagacactgtcatgagcataagctattttcgtacctgaaggcagcctgatacggtggaaagatcctgcatactagagctaaaaacctgagttcaaatcttagctctaccgtctcctgcantggaacttatgcaggcttttcagcccccctgaacttcagtttccttgtctataaaatggttatagtgatttgtattaattagagttgttttaaggattagctaaatgtacatcatctagcacgtagcaagctctcaataagtattagttttatagtagtaaatataaaggtgataaaatgattttataatgataggtttagttattgataaggtataaccataatagggattactgtgcaaattactactgaaaagtaataaccaccaattcattatttatcattatataaataattagactactcttcagatcattgttgctcttgaaa

SEQ ID NO: 3029 - DNA, 661 bp, Homo sapiens
  EYA4
  misc_feature [331]..[331]: Chromosome 6, SNP identification no. = rs11154727
  misc_feature [331]..[331]: allele = c, in linkage disequilibrium with rs1336533, respectively
  misc_feature [331]..[331]: n is a, t, c or g
tttaagggtgtgctgttactgttacctaatttcaaatttgctacttcttgatgtcttttaaaatatcccatgaggaagaaatgggaaacatgccttagtatcctattccagtattttgcagtttttattttcagtgaagtatttttaattattctatctaggagataattgcattctcatcatgctttgggcctttgagaagagacactgtcatgagcataagctattttcgtacctgaaggcagcctgatacggtggaaagatcctgcatactagagctaaaaacctgagttcaaatcttagctctaccgtctcctgcactggaacttangcaggcttttcagcccccctgaacttcagtttccttgtctataaaatggttatagtgatttgtattaattagagttgttttaaggattagctaaatgtacatcatctagcacgtagcaagctctcaataagtattagttttatagtagtaaatataaaggtgataaaatgattttataatgataggtttagttattgataaggtataaccataatagggattactgtgcaaattactactgaaaagtaataaccaccaattcattatttatcattatataaataattagactactcttcagatcattgttgctcttgaaagataagtcaa

SEQ ID NO: 3030 - DNA, 661 bp, Homo sapiens
  EYA4
  misc_feature [331]..[331]: Chromosome 6, SNP identification no. = rs3777864
  misc_feature [331]..[331]: allele = t, in linkage disequilibrium with rs1336533, respectively
  misc_feature [331]..[331]: n is a, t, c or g
tctactttaatacattttacatttatccatgtgctcatgttataaggatttttttgtcagtatgttttgtgtaaaaatagttgagatatgtcttagagtattatgtcattatagcatatatttgatttttacagatgatctaatttcactagttcacaccgattagaagcagttgccatatatttacataaatattagtactccaagaaagaaataatagtacataaactttgcacagagactcatatgtactaatccacatcttttctagcagtttacctgcctctcaggagatagttaccagttcagtattctgtattgcacacttacnatagcttttgtaaactttctgcaaaataaatctatatgaacaaattgttaaggaaaggaatggagttattaacttattgctgacctacttcagtagtatactacaagttaattgaaagctgaatgacaaaactataaagtgttagctccagaaggaatttcagagctctctgatccgttttgtagacaagagaagttaaaagtggttaaggccatacagtcaaggcctcacagctggtcagtggtataaacaaatctaaaaccatgtccttatgatcagtccctgggtcctttctgtaatgccccatcagaaaatagatggaaaaagaaa

SEQ ID NO: 3031 - DNA, 661 bp, Homo sapiens
  EYA4
  misc_feature [331]..[331]: Chromosome 6, SNP identification no. = rs2025705
  misc_feature [331]..[331]: allele = g, in linkage disequilibrium with rs1336533, respectively
  misc_feature [331]..[331]: n is a, t, c or g
taatccacatcttttctagcagtttacctgcctctcaggagatagttaccagttcagtattctgtattgcacacttaccatagcttttgtaaactttctgcaaaataaatctatatgaacaaattgttaaggaaaggaatggagttattaacttattgctgacctacttcagtagtatactacaagttaattgaaagctgaatgacaaaactataaagtgttagctccagaaggaatttcagagctctctgatccgttttgtagacaagagaagttaaaagtggttaaggccatacagtcaaggcctcacagctggtcagtggtataaacnaatctaaaaccatgtccttatgatcagtccctgggtcctttctgtaatgccccatcagaaaatagatggaaaaagaaataggcatgaacaatcatcctgtctgaaattcactcatattgtctttgtagatattttcgcaaatttttaaagaagtatctagggacgtgctgtccagtaaggtagccaccagtcatatgtggttattaaaatttgataaaattaaaaattttgttttttattttcattttcacagcaatattgcagtaagtatatttttattaattgattttgaaaatcatcaagtacgactagaggcgttaagttctcaat

SEQ ID NO: 3032 - DNA, 661 bp, Homo sapiens
  EYA4
  misc_feature [331]..[331]: Chromosome 6, SNP identification no. = rs12211899
  misc_feature [331]..[331]: allele = t, in linkage disequilibrium with rs1336533, respectively
  misc_feature [331]..[331]: n is a, t, c or g
aagtatatttgtaaatgtaattgctactgcattttgtgattatgttttaaagaaatcacctgcactttctttaattattactggaatattttagactgcattttttaattgttcatctgatgggtaaaatgagaggaaatagaataaaatagtattttaccattagaaaatgaagtttggaacatcacagtcttattttgtattgtatttgaattagaacagatatggaggaagagcaatatgtatatattgccatcatatttggtattttaaaatgtaaagtttgcaaattttaaaaatttacttttatattttgaaagcttaattaccntataatcaaagatatttattcatagcatattaatatataagagcatgctaatgatttgagaaactggaagaatgacagagggaatgatttgtgagacaaatgtttatttcatgctttttgcacaaaactcaaagcagtttaattaggagaaagtgtttaggcagctgtttccttttagaaaatgaatttctggaaacatgtatttaacatggtaatttcttcaaattggttatgtacactctagtgaaatgtatttatgaagcaacctttggtgcactggtatttttgtgtcttacagtaattacaagtagtggctacagccccagatca

SEQ ID NO: 3033 - DNA, 661 bp, Homo sapiens
  EYA4
  misc_feature [331]..[331]: Chromosome 6, SNP identification no. = rs9373055
  misc_feature [331]..[331]: allele = a, in linkage disequilibrium with rs1336533, respectively
  misc_feature [331]..[331]: n is a, t, c or g
gtgtatatctgaattggtttggaatcagccagacgtgccaagattttgtattgctgatacatacacatttaaatatagtatgttattttctgcagcatctagagtgtctgcctttacatatatatagactgaaggttggatatccaatggggaacatgatgtaaaatgtggcatgatgaaaggaatgatgttccttttttttttttttttttaaggaagcttcctacctttctttttctttttttaaatttccaattcttgggagcgaattcttagtagggcttttaaatagacttccatagtctttgcatagcattaagtcactcatggngagtgtgaatttgctcatgagcatattaattagctagtgtgtgctccattttcctcatctgtgtattaactggagtgctatttcagatatgagcaagaattgtagacctggaagagacacaggtgtaaaatctaaatcaaatttctacttttacaggtgtggtatagacatagggagtttaaatcatttgtctatggtcactagattggcttgtagcagagcctgagctcctgacattcagactgttgctttttcctatattgttaaaattatattgtggataaagaggattacttcctggatattatagggtttcactgaatctaggct

SEQ ID NO: 3034 - DNA, 661 bp, Homo sapiens
  EYA4
  misc_feature [331]..[331]: Chromosome 6, SNP identification no. = rs766541
  misc_feature [331]..[331]: allele = c, in linkage disequilibrium with rs1336533, respectively
  misc_feature [331]..[331]: n is a, t, c or g
gaagtcagccactaactcttcaatctcaactacttcgaacatggctgaaaatcaaaaaataaggacaaaagatttggaagtgtcaacatatatcacgaattcatctcactccgagctgatttacttattcagggacattcactcttgcttcatgcataattctaacatgctagattttaaaactcacaaaaatattaagaaaacataattagaaggaggactaaagactaccagaggcaggcacagtgacaaaagcaaaaagttgcagctgtcaggaaagtgggaatcaaacatttattaaaagtattcataaaactaaaaaacagaaaanttatttaaaagccaacagtagtctttgaggcattttgtttagtaacaaaggacactttttaggactgaaaatgttatatagtctgtagtataatcctatgacttattttaatcaattaatattgattcaaccaattaatattcattataataactgctttatcaagaaaaataaaattgttcttagtatattttaagatagcaaaatatccaatacattttgtaattccatgccaaatgattaaaacaactacagcataaatgtttaaagcacaaacctttagcaatcaaaaaatctaaaatagccagaataatgcatattccaagaatt

SEQ ID NO: 3035 - DNA, 661 bp, Homo sapiens
  misc_feature [331]..[331]: Chromosome 6, SNP identification no. = rs2025641
  misc_feature [331]..[331]: allele = a, in linkage disequilibrium with rs9459057, respectively
  misc_feature [331]..[331]: n is a, t, c or g
cgagggtctctgctatcccgtctgccccccattctgttcatcttgtgtttctcccagcctggcttccagagccagcagactacactcacagcgccatttcttccttatttctttgcaagctggcttttttgcccagccctctagtgaagctgccccctcaaaggtccccgttaccttctcaccaaaccaagtttcttttctgagtcctgattcttggataccttcctgaggtttttaaaccagtcacctctcagggcttttgcatgtgggaggctgtagccccagatgcctgatggctgtttctcttacctccttccggtctgttaaaaantgcctccttttctgagagggaggagccctcaggaatggtttagcgccatcctctagacgatgagttttcactcagttcatgtgagatccagagctgtccaggtcacgcccttggcccctctgctttctcggggtacttcttgatcgtcttttcctcctgcccctgccttctacccctgtctgtctccactcccctttgatcgctgccatactcatttctggcccctcatctgtaggcatttcccactggacgacctgcccacccggtctctgtctccaattaaactcgcctcctcctcactctgggatggtatcgctgctgtcccattct

SEQ ID NO: 3036 - DNA, 661 bp, Homo sapiens
  misc_feature [331]..[331]: Chromosome 6, SNP identification no. = rs11752586
  misc_feature [331]..[331]: allele = a, in linkage disequilibrium with rs9459057, respectively
  misc_feature [331]..[331]: n is a, t, c or g
ttgagagggccccactggcatgacgtcatctgaccctaacgagctcctaaaggttccatctctaaaaaccattccactgggggtcagggcttcaacatatggatttggtagggcaacagggggtggggatagggtggctcaaacgttcagtgcatgtctcccctacttcccctctttgtttcctctgataacctgttggggttcctgactccctcacccacaccacgctgagctacatttcctgctgtggcttactctggggctggtggagttggcttttgcttccttccccatctcctccccttcccaattccctaccctccaggcattntacatctcagagaggggaagcgcccaactctcctgccgcagatgggcccacccctttgcccaaacgccgctgggggtttaggtgtctgagccaaccttttccttgaaggcctcaaggtcagttgctccatctgcgaaaggtgcctgtgcctgggtacccttggtctatcaagccagtgcgcatgtgaggaagctgctccctctgccacccaggtgggctgtcccacctgaaaccagacagcagaggccccaaaacccagcaggctcttggctcacccagccatttctcagagacggaggaacagccactgtagttccttgagtctgagac

SEQ ID NO: 3037 - DNA, 661 bp, Homo sapiens
  SYNJ2
  misc_feature [331]..[331]: Chromosome 6, SNP identification no. = rs6455937
  misc_feature [331]..[331]: allele = a, in linkage disequilibrium with rs9459057, respectively
  misc_feature [331]..[331]: n is a, t, c or g
cctcctgagtagctgggactataggcacatgccaccatgcctggctaattttttctctttcttttcttttctttaaatggggtcttactatgttgcccatgctgttctcgaactcctgggctcaggtgatctttccgccttggtctcccaaagcgttgggattacaggcatgaactacttactgcgtctggcctgaaaacttaattttttaaagtctgttttgtttaagtaaaatgaaactatttttaaaaagcagctgtagcatttggtggctttgctggtccagagaatgtttgtaggagagagccttatgttactagaaagttgtttnaaactttcaacatatcctaaatgcatcactattggataaaatggctctgaacttgaaattcccatctgtgttccaaagggctagctagctgttttactttcctttcttggagaaagtgattattttttttcttttttttgagatggagcttcactcttgttgcctgggctgagtgaagtggtgcgatctcggctgactgcaacaccgccacccccacctgggttcaagtgattctcctgcctcagcctccccagtagctaggattacaggcacacgccaccatgcctggctaatttttgtatttttagtagagacggggttgtgccattt

SEQ ID NO: 3038 - DNA, 661 bp, Homo sapiens
  SYNJ2
  misc_feature [331]..[331]: Chromosome 6, SNP identification no. = rs9459056
  misc_feature [331]..[331]: allele = t, in linkage disequilibrium with rs9459057, respectively
  misc_feature [331]..[331]: n is a, t, c or g
ggtgctgcgccaggaggctagatgccccggccaggtcctgtgggctgcgccgtctgtgcccttggcccgcgaggctggcaggctgccactgcttgtaaagcctcctggttgaaaaggtgactcggagcagcggattcactgggagcctgtcagccacagaggcagcttgtgcttgtgccccaggcccaggccgcaggaggtgggatcaagttccacggctccagtgtgaaggtctgagcttcattctaaggcaggtttttgaggacatggggctctcgggcacctggttgtattcctgcatcctgcattcctgcccactctctcatgcctncttctccttctccttggcgtgccccaagccagccttccatctcagatggagttgtatgtttctagtgagcccacacaccccctgaggacagggcctcacccccgcacgcctgcttcttcatcacagctgctaggaaatgaagatgcatgtccccaggggcctttgaagtaggatgtggtctccctgagcagaactctgactctaaattctctcctggctctggcgttggtgtgggacttgggttgcgggagggggcaggttgttagcggctgctgctcagacccagcggaggaccgggctgctccaggctcccggcaagatgtagcaaaa

SEQ ID NO: 3039 - DNA, 661 bp, Homo sapiens
  SYNJ2
  misc_feature [331]..[331]: Chromosome 6, SNP identification no. = rs9459057
  misc_feature [331]..[331]: allele = a, g
  misc_feature [331]..[331]: n is a, t, c or g
acctggttgtattcctgcatcctgcattcctgcccactctctcatgccttcttctccttctccttggcgtgccccaagccagccttccatctcagatggagttgtatgtttctagtgagcccacacaccccctgaggacagggcctcacccccgcacgcctgcttcttcatcacagctgctaggaaatgaagatgcatgtccccaggggcctttgaagtaggatgtggtctccctgagcagaactctgactctaaattctctcctggctctggcgttggtgtgggacttgggttgcgggagggggcaggttgttagcggctgctgctcagncccagcggaggaccgggctgctccaggctcccggcaagatgtagcaaaatggccaaatttaaggtgagcacgggctcccgtgcagtttctcacccctgctgctggctgcctgtctgtgaatgctaaggcgaggggtggttctacattgacttcttactgactggtgggagtaacccggaagaggcaaatgacttccttccctttcctcggctctgaacctagaatgttccagtgataccacctccaaactcttcacctgtgtcctttcccacctctctgccctgaggacagggaactaagtggctgctcacggtgggtaaaactgaggct

SEQ ID NO: 3040 - DNA, 661 bp, Homo sapiens
  SYNJ2
  misc_feature [331]..[331]: Chromosome 6, SNP identification no. = rs10455934
  misc_feature [331]..[331]: allele = a, in linkage disequilibrium with rs9459057, respectively
  misc_feature [331]..[331]: n is a, t, c or g
ggctctgaacctagaatgttccagtgataccacctccaaactcttcacctgtgtcctttcccacctctctgccctgaggacagggaactaagtggctgctcacggtgggtaaaactgaggcttacaagacaccttgggcaatgggacagccagaccccagccctcagcacctgcctctcccatcccaagccccagtctctttttcagctgcaaagtcaatacctttgctttcagagagggagcatgtgccacgccaggagaggctttgggtgtatcacagatggagactgcctagcttaactgcgcagtctgaatgattctaaggaggggnagagagaacgcctctggagcctggcacacacatttgccggagaaagtggtgagtgcgttgtgaccaggtgagggacgaaccttaaggagattggctgagaacacctcccctcctcaccctaagtcaacaaacccgggacagcagtgcttccaaaaccttacttgttcacctcacctggagattcttgtggcaaatcgggttctgcctcgttggctctggggtgggccttgagagcctgccgttctaacaagctcccaggtgatgctgatccacgaccagctttgagtaccaggatctcgcatcagcttgggagggaggagacctgaatcc

SEQ ID NO: 3041 - DNA, 661 bp, Homo sapiens
  SYNJ2
  misc_feature [331]..[331]: Chromosome 6, SNP identification no. = rs10455935
  misc_feature [331]..[331]: allele = g, in linkage disequilibrium with rs9459057, respectively
  misc_feature [331]..[331]: n is a, t, c or g
tgattctaaggaggggaagagagaacgcctctggagcctggcacacacatttgccggagaaagtggtgagtgcgttgtgaccaggtgagggacgaaccttaaggagattggctgagaacacctcccctcctcaccctaagtcaacaaacccgggacagcagtgcttccaaaaccttacttgttcacctcacctggagattcttgtggcaaatcgggttctgcctcgttggctctggggtgggccttgagagcctgccgttctaacaagctcccaggtgatgctgatccacgaccagctttgagtaccaggatctcgcatcagcttgggagngaggagacctgaatcctagccctggctccttaggctcttctttccagtgggggaatttagttaattgctccgggccccaatatcttaatctgaaaacaaatgaatgacaacctagttgcctttcctactctgagattccatgcgtcttaaaagaaaaaagttttaaaactaaacatgtcactgtcaccatcgctacttcacacacctaaagttataaaccactcagaaatgcaaatcttaggagatgtgatctggcaaggcaaaatcgaagatggctttgaggtctcagctaaacctagaaatctgatgctctgcattttttatgggatg

SEQ ID NO: 3042 - DNA, 661 bp, Homo sapiens
  SYNJ2
  misc_feature [331]..[331]: Chromosome 6, SNP identification no. = rs10455939
  misc_feature [331]..[331]: allele = t, in linkage disequilibrium with rs9459057, respectively
  misc_feature [331]..[331]: n is a, t, c or g
tgagtgcgttgtgaccaggtgagggacgaaccttaaggagattggctgagaacacctcccctcctcaccctaagtcaacaaacccgggacagcagtgcttccaaaaccttacttgttcacctcacctggagattcttgtggcaaatcgggttctgcctcgttggctctggggtgggccttgagagcctgccgttctaacaagctcccaggtgatgctgatccacgaccagctttgagtaccaggatctcgcatcagcttgggagggaggagacctgaatcctagccctggctccttaggctcttctttccagtgggggaatttagttaatngctccgggccccaatatcttaatctgaaaacaaatgaatgacaacctagttgcctttcctactctgagattccatgcgtcttaaaagaaaaaagttttaaaactaaacatgtcactgtcaccatcgctacttcacacacctaaagttataaaccactcagaaatgcaaatcttaggagatgtgatctggcaaggcaaaatcgaagatggctttgaggtctcagctaaacctagaaatctgatgctctgcattttttatgggatgcttatgaattaatgaaaatacatgagattatctctccttgagtctaccctttcctacaaccagcaa

SEQ ID NO: 3043 - DNA, 661 bp, Homo sapiens
  SYNJ2
  misc_feature [331]..[331]: Chromosome 6, SNP identification no. = rs10806791
  misc_feature [331]..[331]: allele = t, in linkage disequilibrium with rs9459057, respectively
  misc_feature [331]..[331]: n is a, t, c or g
tcacctcacctggagattcttgtggcaaatcgggttctgcctcgttggctctggggtgggccttgagagcctgccgttctaacaagctcccaggtgatgctgatccacgaccagctttgagtaccaggatctcgcatcagcttgggagggaggagacctgaatcctagccctggctccttaggctcttctttccagtgggggaatttagttaattgctccgggccccaatatcttaatctgaaaacaaatgaatgacaacctagttgcctttcctactctgagattccatgcgtcttaaaagaaaaaagttttaaaactaaacatgtcacngtcaccatcgctacttcacacacctaaagttataaaccactcagaaatgcaaatcttaggagatgtgatctggcaaggcaaaatcgaagatggctttgaggtctcagctaaacctagaaatctgatgctctgcattttttatgggatgcttatgaattaatgaaaatacatgagattatctctccttgagtctaccctttcctacaaccagcaaaaacttataaaaagcaattgaagcttactttgggaatgccaagggattgattaaaatatggactgtgctgattccatggctggtttagcagattcttgttaaaagccatgactttt

SEQ ID NO: 3044 - DNA, 661 bp, Homo sapiens
  SYNJ2
  misc_feature [331]..[331]: Chromosome 6, SNP identification no. = rs10945973
  misc_feature [331]..[331]: allele = a, in linkage disequilibrium with rs9459057, respectively
  misc_feature [331]..[331]: n is a, t, c or g
gagacctgaatcctagccctggctccttaggctcttctttccagtgggggaatttagttaattgctccgggccccaatatcttaatctgaaaacaaatgaatgacaacctagttgcctttcctactctgagattccatgcgtcttaaaagaaaaaagttttaaaactaaacatgtcactgtcaccatcgctacttcacacacctaaagttataaaccactcagaaatgcaaatcttaggagatgtgatctggcaaggcaaaatcgaagatggctttgaggtctcagctaaacctagaaatctgatgctctgcattttttatgggatgcttntgaattaatgaaaatacatgagattatctctccttgagtctaccctttcctacaaccagcaaaaacttataaaaagcaattgaagcttactttgggaatgccaagggattgattaaaatatggactgtgctgattccatggctggtttagcagattcttgttaaaagccatgactttttaaaatttttatttttttgtgggtacatagtaggtatatatatttatgggatacatgagatattttgatacaggcatgtaatatgtaataaccacatcatggaaaatggggcatccatcccctcacacatttatcttttgtgttacaaacca

SEQ ID NO: 3045 - DNA, 661 bp, Homo sapiens
  misc_feature [331]..[331]: Chromosome 6, SNP identification no. = rs4710078
  misc_feature [331]..[331]: allele = g, in linkage disequilibrium with rs9364885, respectively
  misc_feature [331]..[331]: n is a, t, c or g
ggtgtgcacttgtggtcctagctactcgggaggctgagctgggagggtcacttgagcctgggaggttgaggctgcagtgagccaagattgtaccactacactccagcctgagcaacagagcaagatcctgtctcaaaaaaaaattcataacagatgtaatagattattataaatgagttttaaaagttttaaatcacttttgttctgaacatgcagagggagaatagattcctaagggggcaggggtaaggtaggggacagaaggcacacactgagggaaacagggacagaaagaacagcaaaaataagaacgaacaaggcacagagtttngcccacggtaagcatttaataaaacttagctattattatcattgttatttttcagaaacaggatttcactctgtcgaccaggttggagggctgtggcctgatcacagctcactgcagcctccaactcctgggcttaagtgatcctcccacctcagccaccgagtagcaggggactacaggtgcgtgccaccaccgtgtctggtccttaggtattattattattatttttgagatggagactcactctgtcgcccagggtggagtgcagtggcacaatcctggctcactgcaaactctgccccccaggttcaagcaattctcctgcttcag

SEQ ID NO: 3046 - DNA, 661 bp, Homo sapiens
  LOC153932
  misc_feature [331]..[331]: Chromosome 6, SNP identification no. = rs9366052
  misc_feature [331]..[331]: allele = t, in linkage disequilibrium with rs9364885, respectively
  misc_feature [331]..[331]: n is a, t, c or g
tttttctggcatccagttcagatgaagctcctgcagttgctccctgggtcccttttcccatctgatccttctttttacccttctttcttccctggtagaaagaacattcttgcattggcagccatctttctggatctggggtaagttttgggtcataattcttaggcaattttcccttctttttctttttcaaatctccctttccttgttcctttggttgactatctctagtaacttttccacccttccaaatgtatgtagcaccaggagaattttcaagagcctcaacatctacttttagagacatactatctgatgatggcaaatgttnactaagagctgtgcctttctctggatctgcaagtgagtaagcagaaataaactgtgccagggtatgaatatcttttggattttgtttccatagctgttctaggtcactaattgcctcctcccgcccatatttgagcttgaagtttgcagcttcttttatcaaggacaaatgagcaggagatttgagctgatggttttgataccaccagatagcttgtgtgaagacatcagtggtactattaaatcttcttcatggctacacatggtcactaatgcagacaccatgcctggtttctgctttaactcctctctgcttctcaatattagacat

SEQ ID NO: 3047 - DNA, 661 bp, Homo sapiens
  misc_feature [331]..[331]: Chromosome 6, SNP identification no. = rs9364885
  misc_feature [331]..[331]: allele = a, g
  misc_feature [331]..[331]: n is a, t, c or g
gagcagcccggttttttcactaatgtactttttccaggttaccacattggatttagatggggtgggtttttctatccgcgtttgtgtagaactttacagctttacagttcagtcctttcacacacatatggtaatttagatggaaaataatcttaggcattggtcttattagacgcatctgctccatgaagcttacgcgttggcagggatgctgctttgcatgtgtgaggccacaagaaacttgggcatagaaatcccatgcgaattgtcagtcactgcttctattttccattatttgttcatcttaattccctaagatgttttgctctcnctctgctgtctcgttcttttgcctggacctgagtggaaaattaggatatgttgttgctgatttttaagtctaggagagaaagtcaccctcactgtgaggaagaatgtattcctatacatcaccctccaggatctaggtgtgaggcatgaccagtcttccaactttattgcctagacgagacatgttgcctgaataaacacgtgtcttactcttcagataggtttgaaaatctctgtggcctgctctcctgtctctgccctgccgtaagtggagacagatggacaaaactaagagatggagagggcgggcagggaattaggcagagcaggc

SEQ ID NO: 3048 - DNA, 661 bp, Homo sapiens
  misc_feature [331]..[331]: Chromosome 6, SNP identification no. = rs9348215
  misc_feature [331]..[331]: allele = c, in linkage disequilibrium with rs9364885, respectively
  misc_feature [331]..[331]: n is a, t, c or g
ttgagaatttcggaatttatacgtatgttggtttgtcatcttcataccaaaatctactttatttgcacatcagtcataaaggtgttttacccatttggcttatttgtgtgtttaaaattaaaactcaagccattttccctctccagaaaatgtgacttgtgtagtatgacatcttactggagttgggggaaggcttggtgggcacctgaataaacatcgatctggggaagatgcacctggagggctgcctggacaagtccctgacgctactagattgcctactttcaaaggactaggaaacattttttcagctttaaaagatttaaaagcnggtgatatttcagaatagtgctgaaagagccctgctgttgaatgaacattgggagcaccgcatgtgggttgtggcaaaccctttatcccatgaggccctctcttctccatgcctctaagttctacagaccatcagtgccgcccctgaaatgtcctgtcttaaatagaatgccttgaaccatacctctgcatcaaaaatgtggagccgggggagctccaaggactggggattctctgtgccttcaaaatgacaagttagaagtactaaggtaaaagcagaaaagcatctgtgagggactaacttcaggtggtgcctctgacaacacagagc

SEQ ID NO: 3049 - DNA, 661 bp, Homo sapiens
  misc_feature [331]..[331]: Chromosome 6, SNP identification no. = rs4710186
  misc_feature [331]..[331]: allele = c, in linkage disequilibrium with rs9364885, respectively
  misc_feature [331]..[331]: n is a, t, c or g
atgggtaagatgctaaaagaacagataagcttcaggagccacatccaatgtcttcattgaactggacctttctgcaggccctctctttgctcaggtgttgagactcccctctctgttggtttcctcctccctgttcattcttccttctcaccctcctctgctggctccctacctttatttacctgacgtggggttccacagggctcaccactagagcctttcctccatcctcatcctccctcactgggcttagtatgttctgtagttctgtagttaaaactgacctttatgtcgatgacactgacttatctccagtctatactttgactcngaggttcagatgcaagtgtccagctatttacttgaccctgccatttggatgtctcctaaacattgcagactcaacatgccacatctgctcatggcaactccatgccctgtcccattcttcttcagctcaattactgccaccaccaattgggaattattcataactgtaatagctgacacttactgagagtttattatgtgccggcactgcctcaaaaatattacacgaattaacacaaataatctgtctggtcctaacaatagtaccatgaggtaggttgtggtaatagtgatagctaatatagctcctagtatgtaccaggcacagttt

SEQ ID NO: 3050 - DNA, 661 bp, Homo sapiens
  misc_feature [331]..[331]: Chromosome 6, SNP identification no. = rs9347176
  misc_feature [331]..[331]: allele = g, in linkage disequilibrium with rs9364885, respectively
  misc_feature [331]..[331]: n is a, t, c or g
gagaatggcctgaacccaggaggcggagcttgcagtgagccgagattgcgcccctgcactccagcctgggcaacagagcgagactccgtctcaaaaacaaaaaacaaaaaaccaaaaccttccagtggcttcccactgcactccgaataaaatataagcccctttctgttgcctacaggccgctcctaagcaaacccccaacgtcctggtcttttccgtatcctcatacatgccagtctttcctgcctcttgttagccttttattgatctcttccattttgttgttctctctgttagaatgtaagctccctgaaggctagagtttgatcantgtagaaagaaataagtaagaaataagaacaggtttaattttaggctatatcagcattccattttgaaaatgtgttctgagttccaaaagagccaaatcttactagactggaacacagtccagtgccgagttgtggagtgcttgtatagttctgccactgtctggagcccacgcgctacaagtgtcccgcacagttgcagctgctttttttgttgttgttgctttcctcttagtcctgcccatcttcttcatttgccacggtgtttgaacttcatgaggctgctgctgtcgaaactgtggtgattctgatggttctgtggatagtggaag

SEQ ID NO: 3051 - DNA, 661 bp, Homo sapiens
  misc_feature [331]..[331]: Chromosome 6, SNP identification no. = rs4710222
  misc_feature [331]..[331]: allele = t, in linkage disequilibrium with rs9364885, respectively
  misc_feature [331]..[331]: n is a, t, c or g
aaagatcttgtcttactggtcttgtattcctagtaaatttcagtatgatgatatcacttaaacactgtaactgtgggacattggcaggagcttggggatatttttagctacttggaactcttattgtaatggtatttattagtaattcaagacaaattttattgtttaattatgctctatgggtttattgccatccaagactgcagtgttttagatgactagaatttagctttttaagaaccccaaatttttatttcagctctttcagtggaaaattttctaaaatatgctatttccttcttaatgagaagatagtgaacataataggacntgtaatttcccacttgagttcatctctttattcttttgtgaggacgcacagtaatgcttttggaaggggtcagcatgttgggcttcttcctacatttaatggtcatttgccaacagatatttactgagttcttttctaggtctggagattcagtgatgaaggcattatttcttgccctcagaaggttcatattgtagtagggaagataaaccaggtagtaaatcttagaacacaatgggatgtttacagtgaagaggagaggccaacctggagtatatgggtttgagatccatacagatctgggttcaaattacagggtgaatggagttg

SEQ ID NO: 3052 - DNA, 661 bp, Homo sapiens
  misc_feature [331]..[331]: Chromosome 6, SNP identification no. = rs9348250
  misc_feature [331]..[331]: allele = a, in linkage disequilibrium with rs9364885, respectively
  misc_feature [331]..[331]: n is a, t, c or g
tatatacgtacattttgcttgctagatgtcttgatgaatagacatttaaaagtccttacccttaagtaattcccaagttagcacggatgataagggctcaaatacttataatatggtgtagaattgaatgagcaacttaagatagaaacatttgctgtagaagaccatacttactagggaggaactggcaaggatttatggaatcggtgatgtcgaagctgcatcatgaaagatggctaaagttgggggaatttgggatgagcattgtacttggatggattagcttggagcttagtccaggcagtaaatatattcatactttgaaaggagngtaatttttatagaggaccctggtggaagacaagactggcacaataggtaggtgtatggcccttctgtgaaggcccttgaatgccaggctgaggagggtgttcttagccagtgaatgtgaccaagtgactgtttttaaagtggcaaatgatactattgcagctgtcctttagcccactggcaaaacgggtgaatattaactgaggggaggtcatgtggtctacggtgaagagcactgaaattatcaattggtttgaattctggcttcagcacttaatatgctggggggacttcaacttcaggcaagttgctcaaaacctttctgagcctc

SEQ ID NO: 3053 - DNA, 661 bp, Homo sapiens
  misc_feature [331]..[331]: Chromosome 6, SNP identification no. = rs9355631
  misc_feature [331]..[331]: allele = c, in linkage disequilibrium with rs9364885, respectively
  misc_feature [331]..[331]: n is a, t, c or g
aaaatacacctctttgtgattctctgaacttggcagtggacctgtggcccttgtggcttttgctcacagggctgaaatgcccacagccttgggcttccaagtggctggtgttgacctggggttcacacacagaaactcattcagttcatgtttattgtttcccacttccctaaactgaggcaatgtgccatgctcagtaccttattgaacacttaattcagtgcaggggtactggtgggaattgcaggtagcataaaaattggagtaaaacatagcctctgtttatgagtatatgatttaggtagggataattaattaaataaaaaattanctctaccacaggcagaaagacccttgctatatgagtctgcttatgtgctcagtgcttctgtgtgccacacctgaaagagatggttgtgttctgaataagacagaattctatagactccacctctgtaagttacaatgcaagtcaatgggaaaatgatttgagactaccacagttgtagaaacacatcttttgaataatcctagtcatacattatttatctcactagcacgttttgagaattagaggtagaaaatgataacacaataaatatataaaatcattgttaaatcccattacctttgcagggatgttagtttcttctggatgtat

SEQ ID NO: 3054 - DNA, 661 bp, Homo sapiens
  TULP4
  misc_feature [331]..[331]: Chromosome 6, SNP identification no. = rs9347227
  misc_feature [331]..[331]: allele = g, in linkage disequilibrium with rs9364885, respectively
  misc_feature [331]..[331]: n is a, t, c or g
gcatccgaacttttgaagagaaaaattcgagctagagggattcttaaagccttaagttacttgaaatctatgtatttgcaaccctttgtctctggaatcatattacactaaactggaatctcaggctgaatgagaataaccaagtggagtaaaaagaagaaaaccgtttcttgatcaccacttaattaacgatgctctttctccaaaggatcagcacgttcttcctctgagaacttgaaaatacaaatggaccccatgtttttttaagcattaccttttcttagaagactgccatcatcttttatagaggaattttttcactatgcattcngtggatctttataaaatactgaccttctaattagattcaggtcagtcttaattaaagggggaaaaaagcaacgcaagccaaccacaaaaacacatataccaatgaaagaaattggtttaaatttcacagcattaacattactttttaagtaaaacagttcattgaagaaagtatgtatgcagcagtggaacatgggcctgtgctttgcagcgattccaacatcctgtgcctgtcctggaaggggcgtgtccccaagagtgagaaggagaagcctgtgtgcaggagacgctactatgaggaaggctggctggccacgggcaacgggcgagg

SEQ ID NO: 3055 - DNA, 661 bp, Homo sapiens
  TULP4
  misc_feature [331]..[331]: Chromosome 6, SNP identification no. = rs9355648
  misc_feature [331]..[331]: allele = g, in linkage disequilibrium with rs9364885, respectively
  misc_feature [331]..[331]: n is a, t, c or g
ggggcacacaaacattgagatcatagcaatataaacattcagtaaggtgcactaaacttaactctcgattatttttatatgcagtcacccatgtaagcgccaacaatatcaaaatatagagcatttccagcaccagttacgggtacttggtgctccttcccagattttacattctgtcttaatccattcctgctgctgaaacaaaatatcttagactgggtaatccataaacaacagaaatttattgcttacagttctgaagactgggaagtccaagatcaagatgttagcagtttcagtgtctggtgagggctctctcctccataaatgncacctcgttcctgtgtcctcacatggtggaaggggcaagggaagcttccttgggcctatcttacaagggtaggaatcccatttatgagggcagagccctcaagacctgatcacctcccaaaggtcccacctcttgataccaccacatggggattaggtttcaacattgaattttgtggggatggaaacattcagatcctagcacgcccctcctgagaagtaactcatattctgacttctgtcactgcttaatggaaatggaatccttcattacatactctctgtgtctggcttctttcactcaacgtgatgtctgtgagattcatccctg

SEQ ID NO: 3056 - DNA, 661 bp, Homo sapiens
  TULP4
  misc_feature [331]..[331]: Chromosome 6, SNP identification no. = rs9347231
  misc_feature [331]..[331]: allele = a, in linkage disequilibrium with rs9364885, respectively
  misc_feature [331]..[331]: n is a, t, c or g
ttagaaacagtgtttgttgatttttgttcctcagtttagatttgaaaacacatgcattaatttttagcaggtatttactgcatctctgttgtgtgccaggtgctgcgtgtatttgccactgtcggggggcaagagaagtcccagcttatacctcatggaatctacagtctagcatgagggtgaaacgtggacttcgccttcctctatttgcatttccattaggaagagaaagcaagctttcaattgttcaaagaatgaagaatgaggcttcctagagattgtgtggtgaagatgatctttgagcagggccttgagaaatacttaggatttngcacgtttagcgcgtgcttttctcagtggtgcaagaagattaagccacattctggctttagagaggcatttctgagagagatgaaggacacttcgttccccagccccaacctaagcatgtgactgtactcaccttgtcagatgctgttggaacctggctgacaaggacaaggacctatgcattttttcctgccctggaacaaaattgcccttgttggacaggcagtgatgttctgtgcgccttttgactatactgtgaaatgtttgtggtttgtaatggggattttatccatctgagcatgctacactttttattagtttccatggcaga

SEQ ID NO: 3057 - DNA, 661 bp, Homo sapiens
  TULP4
  misc_feature [331]..[331]: Chromosome 6, SNP identification no. = rs9364953
  misc_feature [331]..[331]: allele = g, in linkage disequilibrium with rs9364885, respectively
  misc_feature [331]..[331]: n is a, t, c or g
taactgtagtatgtactacactactgtaataattttgtagcctcgtcctgttgctattgcaatgagctccagtgtcgcgagtatccgcttaaaatattgtgtgatgcttgtcatcccagtgtgagcagtttgtccccagtgaattgcgcatcacagtaaaaagtgccctctcactgttctcatgtatttttcctcctgtttcgtgcaatactgtaaaccttgaataaccaccatgagatccatatgaaatggcactagtgatgctggaagtgctcccaagaagcagagaaaagtcatgacattacaagaaaaagttgaattacttgatagntgctggagacaggtctgcagctggggtggctgccatttcagacagatagttcatcttgtaaacaggaagtgtaaacttgccatatggataaatacagtacagtacggtgaatgtattttctcttccttatgattttcttaataatgttttctttttctagctttattgtaagaatatggtatataatacataaaacaaaatacatgttaatttactgtttatgttattggtaaggctactgatcagcaatagacatgagtaaataagttttaggggaggtaaaagttatatgcagatcttcaactgtgtgggggttggcacccctaaccc

SEQ ID NO: 3058 - DNA, 661 bp, Homo sapiens
  TULP4
  misc_feature [331]..[331]: Chromosome 6, SNP identification no. = rs9355652
  misc_feature [331]..[331]: allele = a, in linkage disequilibrium with rs9364885, respectively
  misc_feature [331]..[331]: n is a, t, c or g
ttccccccttcccttttatgcctccaaaaaaaaaaaccaaacaaacaaacaaggaaaaaaaaaaagtgaggctagagtaactataaataacacaaattaacagatttcatgccagcacaatgtgcctgttggccaagaagcagcacttcttatagctcctgtatggctcctgtacagtgtcactccgggtgtagcacgatgcactcttgggcattcctggtatctgtccatcatggagggtttggtagggtccagggcctcaaatggaaatggtcgggaactgatagacccttaactcatcttgttctgggttggcagcctcgagtgcacntgtcagtgtctgcccaagaggctgtattcttatatgtcatatgctttaagaatcagtcttcaagttgatactatttttctaagtgatttggaagattgaattgaaagaccattgttggaaggcaatggcagcaagtagaatgtggcatttatgaagaattgggttccgttaaaaaatgagtgtagcaaaaaccagacagtcaggtaaaaggggaagaaaaatctgttaatgtttatttggcaggtaattgttgctgagatgtttacttaatgttggaagacatggaagatggtaagaataatcccacaggctctgagcaggtggaatagg

SEQ ID NO: 3059 - DNA, 661 bp, Homo sapiens
  TULP4
  misc_feature [331]..[331]: Chromosome 6, SNP identification no. = rs341128
  misc_feature [331]..[331]: allele = a, in linkage disequilibrium with rs341138, respectively
  misc_feature [331]..[331]: n is a, t, c or g
tgtgtgtgtcagagtctcgctcagtcacccagggtggagtgcattggagcaatcatggctcactgcagcctccaactcctgggctccagtgatcctcccgcctcagcctccccaggagctaggactacaggtgctcaccaccatggcctgatacatctttttgttttttttagaggacagggtctcaccttgttgaccaggctggtttcaaactcctggcttcaagtgatcctcccatctcaggttctcaaagtgctgggattacaggtgtgagccgtggtgcctggccgtgttgctattagaaactgccctgcagtgagtatatacaagnctgcaaagtaaaccaaacccagcgaggcagccattgaattagtatgacttgacctgtatgtgtctactgcttatttggtcctggtatatgcattacagagggagcattggccctgcccatacctgaagcctacagttcgtcacaggaaacagcaggaaaatatgggacagaaatgtacatgattcatccttgaaagtgtttttggggggtagttttatgggaggatttgagaattggtttataaagaagaatggaaggagattgctccttcatttgtaggaaaacttgggcaaagatttggacagaaatgtatttatattcattgagtca

SEQ ID NO: 3060 - DNA, 661 bp, Homo sapiens
  TULP4
  misc_feature [331]..[331]: Chromosome 6, SNP identification no. = rs341130
  misc_feature [331]..[331]: allele = t, in linkage disequilibrium with rs341138, respectively
  misc_feature [331]..[331]: n is a, t, c or g
cttggggagatggcaggaatgcagttggatgtgagagtctggggctcaggacagaggcctgggcagggagtcagctatgaatgggatccttgaggctacaggcatgattgtggtttcctagagagaagagggcctagagccaagcctggggagcactagcacggagaattctacaaacaggagcaccagcccacttagaacacattcattacttgaccaacattagggagcagaagcagcagagattgatgcacttgccatatgtgtattcgttattattaggctctcaatcttgttcttctgaagtcctttgctcacataagctttatcncattaaaagtgattaggcatgaaaagaacttgtaatggaagagatttttaaaaatctgattttatgttgtatcactgttcttcagtaatctgtgacatacttgttccaaaacagagtaacttcttccatcattgcttgataattaaactgtcagtgctgcgtttcccattttttccaatcttaatagtgtttttgtcttcctatgggaactgtagttgtaattcattaatggtagtggatttggggcctgccctttttgttctgtttttctttagtgtgatactaaactctgataacttaatcagtccttattcaggaattatatgtatg

SEQ ID NO: 3061 - DNA, 661 bp, Homo sapiens
  TULP4
  misc_feature [331]..[331]: Chromosome 6, SNP identification no. = rs341131
  misc_feature [331]..[331]: allele = t, in linkage disequilibrium with rs341138, respectively
  misc_feature [331]..[331]: n is a, t, c or g
gcttgcaagctggggtctctcatactcttcttatatgggcgctaatcctatcgtgggcgccccaccctcacgaccttgtctaaactgaatcatcccccaaagaccttacctccaaataccatcaacataaattggggaggcggggagctcataaacattcagtccataatagtccatcgcctcaaaagtttatagtgtaactaggggtcagacagaaatcacacaatcccacagtaaagggatgagaatagtgataagtgtggcaatgggtacagcttagttaaagttataagaagtcatgtttcatatttattgttattgaaaattgctnaccaagtacattaaacatctgcctcttccaggatttcagcaggtccgtgacccatgctccggtgtcttgaccctacgcctgtgtcacatgaaggctttgtagacatgctatcagatagtaattttttttttgacagctaaaatttcacctttttctaaaatgaatttcatggtgttcctagtagttatgtctttcctgaaaacagcatatagtaatgaattaattgctgcgtctggaggcaaattgttttagccttttttagtattcattcattaaaatatagatcatatttaaaggaatatttgatgaacaatttattctaaaataact

SEQ ID NO: 3062 - DNA, 661 bp, Homo sapiens
  TULP4
  misc_feature [331]..[331]: Chromosome 6, SNP identification no. = rs341134
  misc_feature [331]..[331]: allele = t, in linkage disequilibrium with rs341138, respectively
  misc_feature [331]..[331]: n is a, t, c or g
aaggctttgtagacatgctatcagatagtaattttttttttgacagctaaaatttcacctttttctaaaatgaatttcatggtgttcctagtagttatgtctttcctgaaaacagcatatagtaatgaattaattgctgcgtctggaggcaaattgttttagccttttttagtattcattcattaaaatatagatcatatttaaaggaatatttgatgaacaatttattctaaaataactgaattctgtgaactttctgcaggcagtctcttagtcatcagtatttatatcctaaaattgccttttgcttgtcactgactttagtgcattngtttagcaataaatatttactgagtgcctgcattgtacacaaagctctgttaggtgccacatagctatggactgtctctcccccaaggagcttcacattaaaatctcaagcaaaaagaagcaaaaattgaaaaagccttaaccagctctccctttgggtaaattctagcctttctagtcagacagccttggcttgatcacttaatgcctttgtcagcttacttggcctctcttaagttgctcgtgtgtttgtaaattggagataacttgcatgattgttgcaatgagatgctgacggatagacagatcccattagacacaaaagatgtaa

SEQ ID NO: 3063 - DNA, 661 bp, Homo sapiens
  TULP4
  misc_feature [331]..[331]: Chromosome 6, SNP identification no. = rs341135
  misc_feature [331]..[331]: allele = t, in linkage disequilibrium with rs341138, respectively
  misc_feature [331]..[331]: n is a, t, c or g
tgcacctcggtggaggtcctgctgcccaggacccaagattcctctcaggatgtcccactggtggcaccactagtgttgttggttggttggtggcggcaggggggatgttcagcagctgtgaggtgctcctttgctgctgtcatggaggggcgcattcagccttcctctatccagattgttctttagctctggccatgtacctgtctgtattacccagcatgctcctgagtatgtgctctgagatgggtgaggccaaggaaggtgtctgaggagcagccctcagcacactgtggtagcaaaagcccacctgggccacaccagcaaaactagngcctaactcatggttttgacaattaatgaggtagagctttcagcatagtgtttagtgcaaagtaagtacttaatattttaataccatgactacatccttaaattaattataaattaatacattaatactattattattctcagtgaagtaaaacattcaacattggaaataaaacattgtttcaggagcatcttcttttccaaatatggttatataacatgcttacataacccaatgtattttctctttggtcaaacataaacctaagctttttcttctaaatttgagaaaataataacaacaaatctctgctgcttcttcgttttccag

SEQ ID NO: 3064 - DNA, 661 bp, Homo sapiens
  TULP4
  misc_feature [331]..[331]: Chromosome 6, SNP identification no. = rs341138
  misc_feature [331]..[331]: allele = c, t
  misc_feature [331]..[331]: n is a, t, c or g
gaatcagtgtgcagcactggcccactcagttggctcttcaccagcatcccatcccctgcacccatctcttttaaaaaaattgagatacaataattgtacatattcatgagctacattgtgatatttcgatacacataatgtatagtgatcagatcattttagttaacatattcatcatctcaaacatttatcatttctttgtgttgggaacgttcaatatcctcgttctaggtatttgaaactatataatatgataatatgttattgttaacatgtcatcctccatggtatggaacactagaatttagccttcctgcctagctgtaaccanctcgttttggggaatgggactggcttcttgattagaagtggtcacactgccgcaggcttctatccttagcctagcacagctgtgcttacactgctgtgtgcccttcatagtcaaagggcacagtgggtgctttctaacctttcctgccattgtggggcatgtcgtcctgtgaagggctgttccgggggaaattagagaaattgtctgcctccgttagaacctgcaatattctcgtgttgtgttgtcttctctttcctgtcacagtgtgttatgcttcccagcagcagacacgtatgtgtgtacacacatactcattcatttattcatttt

SEQ ID NO: 3065 - DNA, 661 bp, Homo sapiens
  TULP4
  misc_feature [331]..[331]: Chromosome 6, SNP identification no. = rs827958
  misc_feature [331]..[331]: allele = c, in linkage disequilibrium with rs341138, respectively
  misc_feature [331]..[331]: n is a, t, c or g
ccagagtaggatctgcattgtcaggcaatttctaaggcaccatgcaagatttcagctttgggaacctggatttgggtggtgtgcttccctccttttcacttggcacttgtgttcctgcagatggtccggcagcatatcccatcccagtgcagaacatcaagcctctgctcaccgtcagcttcacctcgggagacatcagcttaatgaacaactacgatgacttgtctcccacggtcatccgctcagggctgaaaggtacagaatgctgcacacaccccaaacctgcagaccgggcctgtgtgtgcttgcctcaaggccggtcttgtacacnctgtgcttactgattcctgtcctctgtggtgacaccttctgggcttcatggagtctgttaactaaagccactccctcttcactcctttgcttatctgataagtccatacctagtcttatctcaaagggagattcctgacattcagtctttgtcttagcctgctcttttcctcactatgacaagaatgatcctctctcaggtgtacaggtatgtttgcatctggcttacgcatgtctgcacaataaacggactgcagcacctgccatccctaaggcagcagatggtgcacaagacatcatttacacagaagcccctgtaattttaagaatc

SEQ ID NO: 3066 - DNA, 661 bp, Homo sapiens
  TULP4
  misc_feature [331]..[331]: Chromosome 6, SNP identification no. = rs636334
  misc_feature [331]..[331]: allele = a, in linkage disequilibrium with rs341138, respectively
  misc_feature [331]..[331]: n is a, t, c or g
ttctgtgtcttcctagtttcagaaagttagattaaatcgaaatgagctggtgccatcaagtaggtgctgtaaggacagagaaaaagcttcccttctgtcctctctgaaggttccctgaaatgactgacagtagacagattaacaggagaaaaggcatagaaatgtattaatgtgaataagcataggacccacataaaataagagactcaaagaaaggccacatggttgaagtttttataccctttccatggaaaggagggaaatggggaggtgggtaggcaatcatgattagtagtaagtgatttctaggggaaatgaatggatccaggangtagacgttaccttgttaataattcttaggaactgaacaggacttgtaagttatgggaaggtgaggggtagaactcttactgtgaccaaaggtttcgacaacttttattctcttctctggtggttaagtctttcctggttatttggggaaagcaggagatcagaaagtccctggctctgaagcagcttctaaggcatgcttgtccagcttgcagcctgtgggccacatgcagcccaggacagctttgaatgtggcccaacacaaatttgtaaactttctgaaaacattatgagattttttgtttgtttaagctcatcagctcttgttagt

SEQ ID NO: 3067 - DNA, 661 bp, Homo sapiens
  TULP4
  misc_feature [331]..[331]: Chromosome 6, SNP identification no. = rs1754416
  misc_feature [331]..[331]: allele = a, in linkage disequilibrium with rs341138, respectively
  misc_feature [331]..[331]: n is a, t, c or g
tgccaaagttctttagtgatgttcctctgagacagtaatagagaaaaaccaagtggatcggagacctttttaatttcctctatgagacaagtggctgacctgtctgtaatagaacagatgaccccaggctaaaaacattgccatgtgccgtctccaacagtattctggttgtctcatcccagtatttaccaacatagcccgtaagatagtggataaaaaaataagttacaaaacaaaaatgattgctattcataccacatgtaaaggctaagtccttaaaacattctgatcccaagagagaaaaggtaaattgcctacatatagcactgtnggggcacagagaacgagatcccaagtatggtgttttggtacactgaacatttttttttttttttttgagatggagtcttgctctgtcgcccaggctggagtgcagtggcgtgatctcagctcactgtaacctccacctcccaggttcaagcaattctcccacctcggcctcccacgtagctgggattacacgcacacgccaccatgcctggctaatttttgttgttttttagtagagatgaggtttcaccatattggccaggctagtctcgaactcctgaccttgtgatacacccaccgcagcctcccaaagtgctgggattacaggcgt

SEQ ID NO: 3068 - DNA, 661 bp, Homo sapiens
  TULP4
  misc_feature [331]..[331]: Chromosome 6, SNP identification no. = rs650803
  misc_feature [331]..[331]: allele = t, in linkage disequilibrium with rs341138, respectively
  misc_feature [331]..[331]: n is a, t, c or g
tgtgcgtgtaatcccagctacgtgggaggccgaggtgggagaattgcttgaacctgggaggtggaggttacagtgagctgagatcacgccactgcactccagcctgggcgacagagcaagactccatctcaaaaaaaaaaaaaaaaatgttcagtgtaccaaaacaccatacttgggatctcgttctctgtgccccgacagtgctatatgtaggcaatttaccttttctctcttgggatcagaatgttttaaggacttagcctttacatgtggtatgaatagcaatcatttttgttttgtaacttatttttttatccactatcttacgggntatgttggtaaatactgggatgagacaaccagaatactgttggagacggcacatggcaatgtttttagcctggggtcatctgttctattacagacaggtcagccacttgtctcatagaggaaattaaaaaggtctccgatccacttggtttttctctattactgtctcagaggaacatcactaaagaactttggcagcgaaggaaggtaactcgcactattgttttagtgtatcaccagcactggaatttacgacctgtgcaaaagaacctagaattccacatagctcttggtccctgcccaggcctcttctgcatcagccagcacactt

SEQ ID NO: 3069 - DNA, 661 bp, Homo sapiens
  TULP4
  misc_feature [331]..[331]: Chromosome 6, SNP identification no. = rs662079
  misc_feature [331]..[331]: allele = t, in linkage disequilibrium with rs341138, respectively
  misc_feature [331]..[331]: n is a, t, c or g
ctgatatgttttacacaaaaaaattcagcacacctacactattctcttttagccagaaaatcttatggatcctttttggtaaaagtctggaaggttatatgaagtcagtgaaaatttagttcttttgtattaacaagaagccctttgtgtggtattactgggtcaaaaagaggcagctaaattttaacagaaaaagaaaggagtgcttatcaagcaccatatatattgcagctactgtttggagtctgaagttatccagttctttgtcccttagattaccatgtgcatgattcacctctttattagtcattagacatgcatgttgtgtatntgcatacacacgtgcatgtggagcagtggggggtggaggaaagagcaactaattaattagcaaagtgtgtgatgataaaataacaggtacatttttttttcctttaagaagtatgtttcactgcaaggactgaaaaaaaggggcacgtactcaatgaggacgacgtgggcaaatcttatcaggtctgcccacaggagcagatggcatcaatgactgaaaccacctgcctcaaaaattccctcctcattttttcagtgtgcttaatgaaatgacaaaaagagaaaattctgcaaaacaaaaaacacaaacaaagctcaggggttggagctt

SEQ ID NO: 3070 - DNA, 661 bp, Homo sapiens
  TULP4
  misc_feature [331]..[331]: Chromosome 6, SNP identification no. = rs2362576
  misc_feature [331]..[331]: allele = a, in linkage disequilibrium with rs341138, respectively
  misc_feature [331]..[331]: n is a, t, c or g
gaccagggacacaggctatctcataaagtactagcatgaagaattcagcagtgggactaagaaagaataaccctgaattgttcagtgtcagccaggagtatgtgagttttctgcaggagttgaattcctagggcaagagtttaaaattttcagaaattagtgggaaaatcaaagtaaaagaaaatactcattcaatttctacatgtcattatgataaagaagagaaggatacagaagcctagatatagtcaggacagaacttttttgtttcagaaactttttgtaaatgatgtctgtcttatttaaaaaataatccccagtatctttgccnaagacttgagtaataattttgtttgaatctcctatttttaaatttgtttcagaatacaacctaaaaggaacaaactaatgctctactcagtaggcctcttttcccttttcctaaagctcgtggcccagagtctctaatctcaccctcacaggcaatggggagttctagagcacacaagaggtccgtactctggaagcatctatgtttcttctcaatgattttggggggtgtgggttttcggtctctgatatgttttacacaaaaaaattcagcacacctacactattctcttttagccagaaaatcttatggatcctttttggtaaaagt

SEQ ID NO: 3071 - DNA, 661 bp, Homo sapiens
  TULP4
  misc_feature [331]..[331]: Chromosome 6, SNP identification no. = rs588580
  misc_feature [331]..[331]: allele = a, in linkage disequilibrium with rs341138, respectively
  misc_feature [331]..[331]: n is a, t, c or g
aaattattactcaagtcttgggcaaagatactggggattattttttaaataagacagacatcatttacaaaaagtttctgaaacaaaaaagttctgtcctgactatatctaggcttctgtatccttctcttctttatcataatgacatgtagaaattgaatgagtattttcttttactttgattttcccactaatttctgaaaattttaaactcttgccctaggaattcaactcctgcagaaaactcacatactcctggctgacactgaacaattcagggttattctttcttagtcccactgctgaattcttcatgctagtactttatganatagcctgtgtccctggtcgcggctgtgcctgtcatgtggctcaggactgctttatgctaaatcatcagaggcactcacatacgttgctatatcgcttgatgcatgtagctccataatcgttggaacaagaaatggcattatttacatggaatttaatcttttttgaaagagtgattcgcctttgcagatgacagtcatctcattataactttgcacctgcattagaagaagtcctggccgggcgcggtggctcacgcctgtaatctcagcactttgtgaggccgaggcgggtggatcacatgaggtcgggaagttgagaccagcctgac

SEQ ID NO: 3072 - DNA, 661 bp, Homo sapiens
  TULP4
  misc_feature [331]..[331]: Chromosome 6, SNP identification no. = rs602698
  misc_feature [331]..[331]: allele = g, in linkage disequilibrium with rs341138, respectively
  misc_feature [331]..[331]: n is a, t, c or g
agatttcagagatctctgtataaaccagattacgattttagggtcttgaaggagaaaaaaaaaatgtcataaatcttattaatactaatggcttttgttttaccagcaagaaataagtaaattgctctcattgggataagataaaccttttaataaccatttcttataggcactgagtagtttgtaggtgggcatcgaatttccaatgtggaaattatgctgaaaaaactgtctcccagcaggggtatttattttcttttctaagccccacaacatcatcaaatgacaagagtcagcattctcatatgcatgtgtgtcctttgtatgaacnttatctgcccagtagtgcccagaaatcaaatgaatataaactaagactttgttttcgatgtgctttttacttttggcatttataaactctctgagtcatccctgggagtggaggccacagcagtgggaccagtacttatatgaatatacagtcataggttttattgtcttgctgtctcttaaaaaaaaaaaaaaggaagttctacaagtctcatggaaatactggaattggagatacatatttaacatgctaactttattagatcatgatttctacctaatttggttgtgtttcagtaaactacaatccccagtcatgtgacaaacacct

SEQ ID NO: 3073 - DNA, 661 bp, Homo sapiens
  TULP4
  misc_feature [331]..[331]: Chromosome 6, SNP identification no. = rs683219
  misc_feature [331]..[331]: allele = a, in linkage disequilibrium with rs341138, respectively
  misc_feature [331]..[331]: n is a, t, c or g
gtggcagacacctgtagtcccagctactcgggaagctgaggcaggagaacggtgtgaacccgggaggcagagcttgcagtgagccaagaatgcgctacggcactccagcctgggtgagaaagcgtctcaaaaaaaaaaaaaagaaagaaaaaaagaaaagaaaatctacatatgtaagggtctctctctctctgcaccaagaagagaaggatgactggacttctggagacttaaaaaaaaaagaaaagacattggcttaaatctgcagaatgaatatcacccttctttctctgtttccgtgaagcatttaagcctgtagtctaagagaatnttttgagctactctagagacttactcatttctttgggttaactcccacgtatgcaggagatacacaagttattaaacttctgtttgtttttctcttgttaatctgtcttttgcaatggggagtcctgctaagaactcactaagagtagagaagaaaattactcttcctctcctacaagtgaataagtgaagattcagcattcacttctgcaattttctgatttctgcttcagactgatgataaacaccagcttactctgcttattcactatgtgctcatttgactgggaaatagaataaagcattctggttaaaaggcaaaaactgcttt

SEQ ID NO: 3074 - DNA, 661 bp, Homo sapiens
  TULP4
  misc_feature [331]..[331]: Chromosome 6, SNP identification no. = rs675453
  misc_feature [331]..[331]: allele = g, in linkage disequilibrium with rs341138, respectively
  misc_feature [331]..[331]: n is a, t, c or g
tacaatatttaaagaggtttagtctgagccaaatatgagcaaccatggcctaggacacagtctcaagaggtcctgagaatatgtgatgtgccttaggtagtcaggtcacagcttggttttgtacattttagggagacagaagttacagacaaagacatacatcaatacccgtaaggcacatgttggttaagcctgtggaaagataggacatcttgaaaccaggccatacacatgtcacaggtggattcaaagattttctgattggttgaaaatctttggttggttgaaagagttaagctttgcctaaaggcttgaagtcaggagaaacaantgcttgagttaaggtaagggggttgtggaagccaacgttcttgttccccgctgcaacaccccccgccgcaagacggaggtcttgccctgtcccacaggctggagtgtagtggcgcgatctcagctcactgcaacctctgcctcccgggtttaagcagttctgctttcaccctgttgaccaggctggtctccaactcctgaccttgtgatccgccctcctcggcctcctatagtgctagaattacaggcaggagccactgcgcctggccccaaggttcttgttatgcagatgaaactacttaagtagcaggcttcagggtgaataaatggt

SEQ ID NO: 3075 - DNA, 661 bp, Homo sapiens
  TULP4
  misc_feature [331]..[331]: Chromosome 6, SNP identification no. = rs652297
  misc_feature [331]..[331]: allele = c, in linkage disequilibrium with rs341138, respectively
  misc_feature [331]..[331]: n is a, t, c or g
ggtcttttcctgattcaggagacatttaaccaagagtctgataccttttaaggtctgaaaggagacatttaccatttattcaccctgaagcctgctacttaagtagtttcatctgcataacaagaaccttggggccaggcgcagtggctcctgcctgtaattctagcactataggaggccgaggagggcggatcacaaggtcaggagttggagaccagcctggtcaacagggtgaaagcagaactgcttaaacccgggaggcagaggttgcagtgagctgagatcgcgccactacactccagcctgtgggacagggcaagacctccgtctngcggcggggggtgttgcagcggggaacaagaacgttggcttccacaacccccttaccttaactcaagcaattgtttctcctgacttcaagcctttaggcaaagcttaactctttcaaccaaccaaagattttcaaccaatcagaaaatctttgaatccacctgtgacatgtgtatggcctggtttcaagatgtcctatctttccacaggcttaaccaacatgtgccttacgggtattgatgtatgtctttgtctgtaacttctgtctccctaaaatgtacaaaaccaagctgtgacctgactacctaaggcacatcacatattctcagga

SEQ ID NO: 3076 - DNA, 661 bp, Homo sapiens
  TULP4
  misc_feature [331]..[331]: Chromosome 6, SNP identification no. = rs651333
  misc_feature [331]..[331]: allele = c, in linkage disequilibrium with rs341138, respectively
  misc_feature [331]..[331]: n is a, t, c or g
actgataaaactgactcttcgtagcaataagataccaaattccaacgtgattatgacataccatcacgttgaaggaaatcaaagtattttacccccaaatatagtttgttgatatattttgaaatggcaaaacctgcaaatggcaaaacccgcaaatggcaaaaccctgcaaaaccatctcttgttgggaaatttgcattttgtagagaatctccttccttttctaggtcttttcctgattcaggagacatttaaccaagagtctgataccttttaaggtctgaaaggagacatttaccatttattcaccctgaagcctgctacttaagtngtttcatctgcataacaagaaccttggggccaggcgcagtggctcctgcctgtaattctagcactataggaggccgaggagggcggatcacaaggtcaggagttggagaccagcctggtcaacagggtgaaagcagaactgcttaaacccgggaggcagaggttgcagtgagctgagatcgcgccactacactccagcctgtgggacagggcaagacctccgtcttgcggcggggggtgttgcagcggggaacaagaacgttggcttccacaacccccttaccttaactcaagcaattgtttctcctgacttcaagcctttaggcaaagc

SEQ ID NO: 3077 - DNA, 661 bp, Homo sapiens
  TULP4
  misc_feature [331]..[331]: Chromosome 6, SNP identification no. = rs678116
  misc_feature [331]..[331]: allele = t, in linkage disequilibrium with rs341138, respectively
  misc_feature [331]..[331]: n is a, t, c or g
cctcctatagtgctagaattacaggcaggagccactgcgcctggccccaaggttcttgttatgcagatgaaactacttaagtagcaggcttcagggtgaataaatggtaaatgtctcctttcagaccttaaaaggtatcagactcttggttaaatgtctcctgaatcaggaaaagacctagaaaaggaaggagattctctacaaaatgcaaatttcccaacaagagatggttttgcagggttttgccatttgcgggttttgccatttgcaggttttgccatttcaaaatatatcaacaaactatatttgggggtaaaatactttgatttcnttcaacgtgatggtatgtcataatcacgttggaatttggtatcttattgctacgaagagtcagttttatcagtctttcctctattttaatgttaatgttggtcagttgtgcctaaaccccaaagggatgggggcaatttaaggaccatgcccaaacttccttcctgtcacagcctgaactagttttctagactcctttgggatccccttggccaacagcaggcccattccgtaggttgggtggcttagaattttatttttggtttacaagtgtttatttttttctgactggcttatttcacttagcataatgtccttaaggttcatccat

SEQ ID NO: 3078 - DNA, 661 bp, Homo sapiens
  TULP4
  misc_feature [331]..[331]: Chromosome 6, SNP identification no. = rs2225281
  misc_feature [331]..[331]: allele = c, in linkage disequilibrium with rs341138, respectively
  misc_feature [331]..[331]: n is a, t, c or g
cacatggtacaacatggatgaaccttaaggacattatgctaagtgaaataagccagtcagaaaaaaataaacacttgtaaaccaaaaataaaattctaagccacccaacctacggaatgggcctgctgttggccaaggggatcccaaaggagtctagaaaactagttcaggctgtgacaggaaggaagtttgggcatggtccttaaattgcccccatccctttggggtttaggcacaactgaccaacattaacattaaaatagaggaaagactgataaaactgactcttcgtagcaataagataccaaattccaacgtgattatgacatancatcacgttgaaggaaatcaaagtattttacccccaaatatagtttgttgatatattttgaaatggcaaaacctgcaaatggcaaaacccgcaaatggcaaaaccctgcaaaaccatctcttgttgggaaatttgcattttgtagagaatctccttccttttctaggtcttttcctgattcaggagacatttaaccaagagtctgataccttttaaggtctgaaaggagacatttaccatttattcaccctgaagcctgctacttaagtagtttcatctgcataacaagaaccttggggccaggcgcagtggctcctgcctgtaattcta

SEQ ID NO: 3079 - DNA, 661 bp, Homo sapiens
  TULP4
  misc_feature [331]..[331]: Chromosome 6, SNP identification no. = rs635995
  misc_feature [331]..[331]: allele = t, in linkage disequilibrium with rs341138, respectively
  misc_feature [331]..[331]: n is a, t, c or g
tcccatctggaatttaggtccaactgacctgagtaaatgttaaaatagagatcataagactgacaaaaggctcttgatggcaataagataacaaattctaaacaatacctaaggccatgcaaggcaagccttgagccatgcctacaggccatcaatctcactaaatgggtcataattttggctgactctgacatagcttccgaacgttttaacttaaaatattcctttctgctgactcccaagttctagaccaaattttgttgctttaactaactgtagattaaagaatctctgaatctacctgacttgtatactcctctacttctcctgntttcaagatattccacattttcaagctgagccaacgtataccttccacatgttgatttatgtctttgcctgtaactcttgcctccctgaaatgtacaaaaccagactgtaattcaactgcttcgggcgcactttctcaggacctcttgagactgttttgctgggccagcatcactcatactggctcaaaataaacctctttaaaatattttacagtttagtctttctgttaacaagctgctatgaaaaaacagtacggcagttcctcacaaaattaaaaatagaattaccatatgatccagcaagtccacttctgggcacaaatccagaa

SEQ ID NO: 3080 - DNA, 661 bp, Homo sapiens
  TULP4
  misc_feature [331]..[331]: Chromosome 6, SNP identification no. = rs585078
  misc_feature [331]..[331]: allele = g, in linkage disequilibrium with rs341138, respectively
  misc_feature [331]..[331]: n is a, t, c or g
aggtttattttgagccagtatgagtgatgctggcccagcaaaacagtctcaagaggtcctgagaaagtgcgcccgaagcagttgaattacagtctggttttgtacatttcagggaggcaagagttacaggcaaagacataaatcaacatgtggaaggtatacgttggctcagcttgaaaatgtggaatatcttgaaaccaggagaagtagaggagtatacaagtcaggtagattcagagattctttaatctacagttagttaaagcaacaaaatttggtctagaacttgggagtcagcagaaaggaatattttaagttaaaacgttcggangctatgtcagagtcagccaaaattatgacccatttagtgagattgatggcctgtaggcatggctcaaggcttgccttgcatggccttaggtattgtttagaatttgttatcttattgccatcaagagccttttgtcagtcttatgatctctattttaacatttactcaggtcagttggacctaaattccagatgggagggagtataatgaggttgtgtccagcctcccttcctgtcatggctgggaattcagtttttaaggtttttctggggtttccttggccaagagagtctccattcagtcgatagggggcttaggattttatttttg

SEQ ID NO: 3081 - DNA, 661 bp, Homo sapiens
  TULP4
  misc_feature [331]..[331]: Chromosome 6, SNP identification no. = rs597765
  misc_feature [331]..[331]: allele = a, in linkage disequilibrium with rs341138, respectively
  misc_feature [331]..[331]: n is a, t, c or g
gggagggagtataatgaggttgtgtccagcctcccttcctgtcatggctgggaattcagtttttaaggtttttctggggtttccttggccaagagagtctccattcagtcgatagggggcttaggattttatttttggtttacaagcggcaccattttacattttcactaacattacacaaggattctagtttttccacatccttgccaacattgtcatttttctgggattttttttggactaaccatcctcttggatgttaggtgatatctcattgtggttttgatttgcatttcctaaggattaataatgttgattagtgatgttgtcntgtatcttcttttgagaaatgtgtgttcaagtcctttgcccatttttcaatcaggttatttgggtttttgtttttaagaagtaggattaaactgtgtctttgggcagtataatattttgagcaaataagcatatttgttcactcatttgttcaagcatccagccaagatattttgaggagctactgtgtggctggcactgagctctgagtgcttgtgtttcagggctgaacaaggaagacatgatccatatctcctaggagctcacagctagttaaggaagacagacaagtgatgacacagaaatgcttttgactttgaagtagaactgt

SEQ ID NO: 3082 - DNA, 661 bp, Homo sapiens
  TULP4
  misc_feature [331]..[331]: Chromosome 6, SNP identification no. = rs598665
  misc_feature [331]..[331]: allele = c, in linkage disequilibrium with rs341138, respectively
  misc_feature [331]..[331]: n is a, t, c or g
gtcatttttctgggattttttttggactaaccatcctcttggatgttaggtgatatctcattgtggttttgatttgcatttcctaaggattaataatgttgattagtgatgttgtcgtgtatcttcttttgagaaatgtgtgttcaagtcctttgcccatttttcaatcaggttatttgggtttttgtttttaagaagtaggattaaactgtgtctttgggcagtataatattttgagcaaataagcatatttgttcactcatttgttcaagcatccagccaagatattttgaggagctactgtgtggctggcactgagctctgagtgctngtgtttcagggctgaacaaggaagacatgatccatatctcctaggagctcacagctagttaaggaagacagacaagtgatgacacagaaatgcttttgactttgaagtagaactgtttacctggtgctttgataacctggaggaaaggagtcttgcacctgctctttgtgggtatttttccacctctgcctgatcacttttcgcactctgtattcctcagacaatttcaaccagtcttacagctttaattccaatctcaatgaaggtctgaagcctaaggaaagaggcctgtatagacccacctgcttacttcacagacccattagccat

SEQ ID NO: 3083 - DNA, 661 bp, Homo sapiens
  TULP4
  misc_feature [331]..[331]: Chromosome 6, SNP identification no. = rs631222
  misc_feature [331]..[331]: allele = g, in linkage disequilibrium with rs341138, respectively
  misc_feature [331]..[331]: n is a, t, c or g
ccttaaaaagatcaccataatctggccctccatcccctctagaattagctcttaccactccatcctcctctgaccctgccaatctggatttttctgtttctcagtttaccagatgcctcctttcttccaagctttgcaccacgcctggaacagatcttggctcatggcagtctcagtaaatactggttgaatgaatcagtgagccttaacattgtatcttactgctgcccattacttggtgagttatgttggggcagcaatcctctccagggggcaccagctgcagagagtctgtcccttgcagacccctgacccagcaacggatgaatanaagtacactgacacacagatactctgctttgccagtccagctgtgtgggagccgcttacagactccctgctgagtcgtgtaaacagttgcgactccactcgcatttattcagtaagattaattaacaaaagcttgagtcaacaccattagagggtaattgacattgtggacttccccagtaaaaagcacttaagcacctggtacatcaaaggttagtcttaagattatatgagtaaacaagctaggtaggtaaactacgctgcctttctttattactattttaatttgtttaactaaaggtaaagggatcaggccgccttcagccagata

SEQ ID NO: 3084 - DNA, 661 bp, Homo sapiens
  TULP4
  misc_feature [331]..[331]: Chromosome 6, SNP identification no. = rs643677
  misc_feature [331]..[331]: allele = a, in linkage disequilibrium with rs341138, respectively
  misc_feature [331]..[331]: n is a, t, c or g
aaaaagcacttaagcacctggtacatcaaaggttagtcttaagattatatgagtaaacaagctaggtaggtaaactacgctgcctttctttattactattttaatttgtttaactaaaggtaaagggatcaggccgccttcagccagataaattaccgaagttacacaaacttctcagttttccaagatttgtgtctatttctataactatctctaatatttttccaccagcctgattgaaccccagcattatgtaatttccaaggatcagataacttaaacttatttgccatttatattatctcttggtttctttagccactggcaatcntaacataatttcttttaaaaaaattaataataaatcacttttagaaatagaatacagtttgattacagcatagtttatgtaagggacaacaacaggaagtaagactagaaaagtgtcttaggaccaaatgtgtcttagtctgtttgggctgctataagaaaataccttagactgggtgatttataaataatacaaatttaattctcacagttttggaggctgggaagtccaagatccaggcactgatagattcagcgtctggtccgctccatagatggcgccttgtgcctgtgtcctcacatggtagaatgagtaaaagcagggaggcgc

SEQ ID NO: 3085 - DNA, 661 bp, Homo sapiens
  TULP4
  misc_feature [331]..[331]: Chromosome 6, SNP identification no. = rs590841
  misc_feature [331]..[331]: allele = t, in linkage disequilibrium with rs341138, respectively
  misc_feature [331]..[331]: n is a, t, c or g
atcgcttgaacccaggaggtggaggttgcagtgagctaagatcatgccactgcactccagcctgaatgacagagtgagatcctgtctcgagaaaaaaaaaaaaaaggtctgttttcactagtactgacctcctcctcctcacagtcctccagaagccaaatctcttacaatctctctgaactctgtgtctctcttccactctattttcaccgttctggatttttgtcctgattccgtcttactgagataataacactgacgtcagtttagtctccccaaagccctgtctcacctctcccttgctcataaaataaaaatacaaaacaaaagnccaaatgaagtttaacatcttggtcagtgctatgtatggtctgaatgtgtgtccctccgaaattcttgttgcaatctagttcccatggtggtggtattaggtggggcctttgggaagtgattaagtcataaggcctccaccctcacgatgggattagtgcccttataaaagagattaaagggaggcgcctccctgcttttactcattctaccatgtgaggacacaggcacaaggcgccatctatggagcggaccagacgctgaatctatcagtgcctggatcttggacttcccagcctccaaaactgtgagaattaaatttgtattattt

SEQ ID NO: 3086 - DNA, 661 bp, Homo sapiens
  TULP4
  misc_feature [331]..[331]: Chromosome 6, SNP identification no. = rs659813
  misc_feature [331]..[331]: allele = c, in linkage disequilibrium with rs341138, respectively
  misc_feature [331]..[331]: n is a, t, c or g
agcgtctcaccatgttggccaaggctggtcttgattttctgacctcaagtgatctgtctgcctcggccttccaaagtgctgggattacaggtctgagccaccacacctggccaaaagcagaccattttagttactgttgcagccacatctctaagtgtggaaggcgtttggggatgagggactagaactgaggcaagagattggggtggagatagagatttggagtcatccacatggaggccatagttggagaaatgaaatggatttaatgtcaaaggaatgaatagaacgaggggaaatgaggaaagggccaagcatagaactttgggtngtggagtgatagccttcatttaacaagcagcagaaggaaggagatggaagaggaatgtcatagagagctgttaccaggggtccttgctcccagagctcccaagatggtggtgggctgcttccagaatggcggcgggccacttccaagatggtggcaagcctcgtgttctctgacctggggttcttggcctcacggattccaaggaatggaatcttgggccatgcagtgggtgttatagctctattagaagtcgtgggtcacggaagagaaccgtggaacccagtgactagtgttcagctcgattagggtgaacacagtcacttagccgtg

SEQ ID NO: 3087 - DNA, 661 bp, Homo sapiens
  TULP4
  misc_feature [331]..[331]: Chromosome 6, SNP identification no. = rs660213
  misc_feature [331]..[331]: allele = a, in linkage disequilibrium with rs341138, respectively
  misc_feature [331]..[331]: n is a, t, c or g
cttccaaagtgctgggattacaggtctgagccaccacacctggccaaaagcagaccattttagttactgttgcagccacatctctaagtgtggaaggcgtttggggatgagggactagaactgaggcaagagattggggtggagatagagatttggagtcatccacatggaggccatagttggagaaatgaaatggatttaatgtcaaaggaatgaatagaacgaggggaaatgaggaaagggccaagcatagaactttgggtagtggagtgatagccttcatttaacaagcagcagaaggaaggagatggaagaggaatgtcatagaganctgttaccaggggtccttgctcccagagctcccaagatggtggtgggctgcttccagaatggcggcgggccacttccaagatggtggcaagcctcgtgttctctgacctggggttcttggcctcacggattccaaggaatggaatcttgggccatgcagtgggtgttatagctctattagaagtcgtgggtcacggaagagaaccgtggaacccagtgactagtgttcagctcgattagggtgaacacagtcacttagccgtgcaggaacaatggcaagcctttagcctgatcgggagcggcaatgggcacctcgctggatcaggaacac

SEQ ID NO: 3088 - DNA, 661 bp, Homo sapiens
  TULP4
  misc_feature [331]..[331]: Chromosome 6, SNP identification no. = rs675053
  misc_feature [331]..[331]: allele = g, in linkage disequilibrium with rs341138, respectively
  misc_feature [331]..[331]: n is a, t, c or g
cgaatcttccttgtgcttttcatcctgcctttttagcttattgagaagacaggcattgtcctgtagtgtgtgtgtgctttggctccctcctgtacttaaaaatcctttgtctctttctacaatctctccttcctttctgtctcttccagattaaacctccctactgccctcaaacccacatcttccaacttgcactgggctcttgtcccttgctgtactttttcttgcttatttcttcttttttccccaaagacttattaattgtatatgaacacagtcatgcctctccatttcaagttaccatcctctctctgccttcccctcaaacccngtcaaaacagtagtttacatgtgctgcctcaacttcttcactagctgcttagtcgccaattctttatcttggctgtcacagctgtatctccagcacctagaacaatgcttggcatacagatggctcaataaagatgactgaatgaacgaaaaatcttttaccatgtgacttccatcaccattctagtgagaccatttttgaccttaaaacctccaaatccaatgtttcatgtctactttcaactgttgttctcttgtttgacatatttcctttaatggttctgagagacaggactagctggatttcctaggccgactaagaatccctaag

SEQ ID NO: 3089 - DNA, 661 bp, Homo sapiens
  TULP4
  misc_feature [331]..[331]: Chromosome 6, SNP identification no. = rs595378
  misc_feature [331]..[331]: allele = a, in linkage disequilibrium with rs341138, respectively
  misc_feature [331]..[331]: n is a, t, c or g
gaccagtgcctagactgtagtaaaggttttatggccttaaccattgcagaagttctcatcagccatcacatgaaagtaacatggatcctgaatttaaactatttgagctcaggaataagagaaaaggccctgactgatcttcctttgaagaaagatatccctacagtacctcagcatttcaataaattattgattctttttttcattgagggtccatttcaaccattgaaaaaatcgcctcaataatagaaagttaaataatgatgccattaaaaatcaagtacaatattaattatatttagcaccagtttaactcttgtctaatgattcnaaaatcacatgtgatctatgctgtgctattcaaggagtccaaaggcagggacatttttatagcaggaaggaagttaggcgatttattggactgcttataaaaagaactaaatgcaatttagattggataatgtatttccaagttaattagattgtagggtattgcgtacaaaaccattgcctgggacgaacttgcagcagcagcagcagctttaaaattgattctcctgatttacttgtaacagcaatgcttgtggctggagctcttctaaggaaatatgctctgatttattttcctttctgtcctacatgttgtaatgtaaaattctgt

SEQ ID NO: 3090 - DNA, 661 bp, Homo sapiens
  TULP4
  misc_feature [331]..[331]: Chromosome 6, SNP identification no. = rs612557
  misc_feature [331]..[331]: allele = a, in linkage disequilibrium with rs341138, respectively
  misc_feature [331]..[331]: n is a, t, c or g
caggagtgagccataacatgcctggccttttaaaaatttgttataaacagagtctcactgtctcccaggctggagtgcagtggcatgatcatagctcactgtagcctcaacctcctgggctcaaacgatcctcctgcctcagcctcccaagtagctaggactacaggtgtgcaccaccacacccagctaattttgaaaatttgttttgtagagacagggtcttgctatgttgcccaagctggtcttgaattccttgcctcaagcaatcttcctgcctcagcctcccaaagtgctgggattataggcatgagccattgcaccttgcccttcntctgttttaaagtgaactattttgcacatgtttgtacagacataaaacatttcatcctactaggtgcattttcttcaagacagatcccccatccttcttagggagagctacagaaagaacaaacaaagggtggagagggaggctggagagcctccgactgtcccaggaatctgcctcctcggtggccgggtagccagtcctcagcccaaggcctccctcagtcatccagaaaccctgtgctggcactgcctggttttccctgtccaggaccagtatagttggtttttgttcctcctacattttcagaagactctatccaactcactgcta

SEQ ID NO: 3091 - DNA, 661 bp, Homo sapiens
  TULP4
  misc_feature [331]..[331]: Chromosome 6, SNP identification no. = rs629389
  misc_feature [331]..[331]: allele = c, in linkage disequilibrium with rs341138, respectively
  misc_feature [331]..[331]: n is a, t, c or g
catcctggcgtggcagggagagaataaatacaggtgaagtatccttaatctgaaaatctgaaacccaaaatgctccaaaatctgacttttggagtgccaacaagatgctcaaaggaaatattcattggagtatttcgaattttcagatttgggatgctcacctgatacaatgcaaatattctgaaattaaaaagaaatctgaaatccacaacaattctggtcctaagcatttcagataaggagtactcaacctgtatctcagtatctgtgacaggaactacctgataacgtgaggtagtgaaattccgtgaagtaaaaaacagtgttgagngagagccagagcaacagcaagggggtctttttgaagagagggagcagggaggctgccctggaggtggtttgagcagaggcctggctgagaggagaaatctatttaattggaattgaaagcttcctcactatattactatttttgtatatagcagtgagttggatagagtcttctgaaaatgtaggaggaacaaaaaccaactatactggtcctggacagggaaaaccaggcagtgccagcacagggtttctggatgactgagggaggccttgggctgaggactggctacccggccaccgaggaggcagattcctgggacagtcggaggct

SEQ ID NO: 3092 - DNA, 661 bp, Homo sapiens
  TULP4
  misc_feature [331]..[331]: Chromosome 6, SNP identification no. = rs629364
  misc_feature [331]..[331]: allele = t, in linkage disequilibrium with rs341138, respectively
  misc_feature [331]..[331]: n is a, t, c or g
attctctgcccttgtagagcttacatcctggcgtggcagggagagaataaatacaggtgaagtatccttaatctgaaaatctgaaacccaaaatgctccaaaatctgacttttggagtgccaacaagatgctcaaaggaaatattcattggagtatttcgaattttcagatttgggatgctcacctgatacaatgcaaatattctgaaattaaaaagaaatctgaaatccacaacaattctggtcctaagcatttcagataaggagtactcaacctgtatctcagtatctgtgacaggaactacctgataacgtgaggtagtgaaattccntgaagtaaaaaacagtgttgagcgagagccagagcaacagcaagggggtctttttgaagagagggagcagggaggctgccctggaggtggtttgagcagaggcctggctgagaggagaaatctatttaattggaattgaaagcttcctcactatattactatttttgtatatagcagtgagttggatagagtcttctgaaaatgtaggaggaacaaaaaccaactatactggtcctggacagggaaaaccaggcagtgccagcacagggtttctggatgactgagggaggccttgggctgaggactggctacccggccaccgaggaggca

SEQ ID NO: 3093 - DNA, 661 bp, Homo sapiens
  TULP4
  misc_feature [331]..[331]: Chromosome 6, SNP identification no. = rs627967
  misc_feature [331]..[331]: allele = g, in linkage disequilibrium with rs341138, respectively
  misc_feature [331]..[331]: n is a, t, c or g
tcagctggaaaggacaaactctaggccacagtgctggaggcgagtggcccatggaggggcaggcttctcctctggcttctccccctcaatgctgaggctgagccccggaaaggaaaagatgcgggccagccctgcctcacctcccaccagggagtgtggcaatcaaggcctggtgcccgttccttactctgccacctctcctcctgctagtacacaagacatgccatgcgtccagccaatcatttttttatctactgagctgttagtcattagataaatatttgctaaatgtatacaaatggacagatccatgctagttataaggggactnacaatgaatcaaatacattctctgcccttgtagagcttacatcctggcgtggcagggagagaataaatacaggtgaagtatccttaatctgaaaatctgaaacccaaaatgctccaaaatctgacttttggagtgccaacaagatgctcaaaggaaatattcattggagtatttcgaattttcagatttgggatgctcacctgatacaatgcaaatattctgaaattaaaaagaaatctgaaatccacaacaattctggtcctaagcatttcagataaggagtactcaacctgtatctcagtatctgtgacaggaactacctgataacgt

SEQ ID NO: 3094 - DNA, 661 bp, Homo sapiens
  TULP4
  misc_feature [331]..[331]: Chromosome 6, SNP identification no. = rs628203
  misc_feature [331]..[331]: allele = c, in linkage disequilibrium with rs341138, respectively
  misc_feature [331]..[331]: n is a, t, c or g
attcattgtcagtccccttataactagcatggatctgtccatttgtatacatttagcaaatatttatctaatgactaacagctcagtagataaaaaaatgattggctggacgcatggcatgtcttgtgtactagcaggaggagaggtggcagagtaaggaacgggcaccaggccttgattgccacactccctggtgggaggtgaggcagggctggcccgcatcttttcctttccggggctcagcctcagcattgagggggagaagccagaggagaagcctgcccctccatgggccactcgcctccagcactgtggcctagagtttgtcctntccagctgagcagtggttctccctgttccaccagacccacactccctgaaatgcagctcagtttcttgcacttttgcctcagatttagacgtgtaaaatatgtgaacctccctatgcaaattaagatttgaatgtcatctgcttcacagttctagccatcagttctaaaaatagtcgttttatgggatttgagaaagagattaagaccgcaaacttacaattgagtttttccctagcagacagcagctgttcaaacacaacgtgaatctgggagctttgaagagctgtgctgttctgctgcggctcagcctagtaggcggaggttcttag

SEQ ID NO: 3095 - DNA, 661 bp, Homo sapiens
  TULP4
  misc_feature [331]..[331]: Chromosome 6, SNP identification no. = rs2771425
  misc_feature [331]..[331]: allele = g, in linkage disequilibrium with rs341138, respectively
  misc_feature [331]..[331]: n is a, t, c or g
aattaagatttgaatgtcatctgcttcacagttctagccatcagttctaaaaatagtcgttttatgggatttgagaaagagattaagaccgcaaacttacaattgagtttttccctagcagacagcagctgttcaaacacaacgtgaatctgggagctttgaagagctgtgctgttctgctgcggctcagcctagtaggcggaggttcttagggaggaggtaccttcagcatgggtgaggtctgtgggcctgcagacagtgtgttcatgttctgccatcacccatgaacctagaggacagagtgatggaaattgatgactgtgaggtggcnaaatcaggactagcgttagtgaacgccccgccccgtgtctgtggccacatgcagttagcgccatttgactcttgttcttgccaaaactacagaacatttgtagcgagggctttataggctggaataccagtaaacagccagggaaaaattaacaccagcagaaatgtgacttttaaaaagtaagatgacctgttagggactttctgtggacttacaggggtcctgagaagtcataccctgctgcctcacttctgaccaaacagtcatcacagtcattcatttccccaggtcagtgatgactcagaatcttcagacaagaggggcagttct

SEQ ID NO: 3096 - DNA, 661 bp, Homo sapiens
  TULP4
  misc_feature [331]..[331]: Chromosome 6, SNP identification no. = rs1571962
  misc_feature [331]..[331]: allele = g, in linkage disequilibrium with rs341138, respectively
  misc_feature [331]..[331]: n is a, t, c or g
ttccctgcagtgattttcattgctcagttaatgtattcaagatgctccctgcacatctctctgggatcctagattgtaagcttcagagggaagggactttgttctttttttgtgccacttggtactaggctagtgtccgtgcacccatcagtcactgccagctcagtctgccacctccctctgaaactttgcccatcacctatggcagaacgaacagcacgcttagtcattgtgctccagacgctgccccgctgaatcctgtgggcctggggggagagaactgagtcatctttgtgccctcagtggatttggatttgttttcattagttcntgcttcctctcgccacttcctcgctccagtttactctcctgcccattagtctggtccctgcctctcattacgacctggagctagcatgacctgtggcctgaccagtcaccccaagtcacagtgtggtgggcttgctcactctcaacttgtactcagcgctgtacacaggtgccccacctctgcctgccagccttcatttgttcagcatcggcagtgacactctactacccctgcaaaacagcaataccacttgtcaatattagatattagtccgttttttctgtcttttgactcgtgacaagctagtaccaggaacaaagaaagcaacta

SEQ ID NO: 3097 - DNA, 661 bp, Homo sapiens
  TULP4
  misc_feature [331]..[331]: Chromosome 6, SNP identification no. = rs6928393
  misc_feature [331]..[331]: allele = g, in linkage disequilibrium with rs341138, respectively
  misc_feature [331]..[331]: n is a, t, c or g
gggtccaggcgtcgagcctcctgattcagtgagtgctttaaaaagggggtgatgtgggcgacacaacctggggccagcctcctttccaaggagcttgccaagcttttctgcctcagaggggcccctgttcacagatgccacctccaaatgctcagaaacttctagattggtttggattaagaaactcatcctttaaaatataaacaacctttttggatggtaagatcactcacattatgaattatttcattgtgattgaatgatacagcttttatttattacctggcaaggcacttggagccttgaggcaatgagattttcatcagaaaancaaagtaatctggaagaatggggtcctcacattgaggacagacctggggcagtggaggggggtgtgtgggggatttgggtggtgaggggatgtgatagcacaggtggggatgggcagcaagggagaggaattccaacgaagaggaactttgccccacagttttgccatcatcccactctgcacatcatctcaccgtctgcctgaaggccccatgcggagtacccccagaagaacccagagccatcctgggagttcccaccgcacaggtttcctagcctttgctccacgcaggcaagcagctttaccaggcgggagagccaggcccccgcc

SEQ ID NO: 3098 - DNA, 661 bp, Homo sapiens
  misc_feature [331]..[331]: Chromosome 6, SNP identification no. = rs7752989
  misc_feature [331]..[331]: allele = c, in linkage disequilibrium with rs10484524, respectively
  misc_feature [331]..[331]: n is a, t, c or g
gagacggggtttcaccatgttgcccaggctggtcttgagctcctggcctcaagtgatccgcccacttcagcctcccaaagtgctgggattacaggcatgagcccccgtgcctggccagcattaggaggtcttaatggggacagtgacaggaatatgaggcagagctgggggatcagcacctgctccttcccccgggctgcctgtctctctggcaccctctattcacagggtgcatggggcagtggacatggaacatggacgaggctcccagcccatctgctcccccaggccatgtgtagagggtgggtttggagctgagagaggacagctntgtagtcaacacactgtctgatcccaaattcatgttcctggattctgcctcaccctcgcctctgttgggggttgagaacctgccccaagtcaggtcctactgcgttttcatgatggctccaaagagtctcccttgagtgctggaattgcacggggcccagcaccgttggctgcaagactgtctagtagcctgcacttccaagtctcgctgccttctgggtgtggccaaagccctgttgctgcctctgggatccctgctcctccccatcccctgccagctcactctccagcctgacccaccgcgtttgctcttggtttatcagctcatgcc

SEQ ID NO: 3099 - DNA, 661 bp, Homo sapiens
  misc_feature [331]..[331]: Chromosome 6, SNP identification no. = rs9356509
  misc_feature [331]..[331]: allele = g, in linkage disequilibrium with rs10484524, respectively
  misc_feature [331]..[331]: n is a, t, c or g
ccaggggcaaccactgtgggttgagggttgctcctccctcttgcaggttcagaactgcagcctttccagggcatccagagatgagggcactcaggagaagggccttgcaggcatgagcctcacagaggtgcaaatggcagtgccaacacattgaataggatgtggagaatgtacacttccagtcacaggaaagctcaggtgctgcgttcagggtgcccttccctatgtaaaggtaatagggagtggaaaatcacactcatccttcaccggtccgtgcggccttgcccttttcggcagcctggtgagaggtccatgtggtgaggctgtaagncctgcaacacgcgcatgagtgaatttgggagtgattccccaacgtcatccttcggatgagaccacagccctgcctgacagctggatgtagcctcatgaagaactgctgagctgcagccacacttctgcccccacagcaatggtgagacagtaaatgcctcttttgttttttaatgccagtaagtttgggggtaatttgttatgtactaaaggtagttagtacacctcgtaaaaaattgaaacatactatttcattctgagtaacatgactgccacactttgaagtgattagtcttcaatgagtatccctcctaaaacataagtgtgatct

SEQ ID NO: 3100 - DNA, 661 bp, Homo sapiens
  misc_feature [331]..[331]: Chromosome 6, SNP identification no. = rs9348169
  misc_feature [331]..[331]: allele = g, in linkage disequilibrium with rs10484524, respectively
  misc_feature [331]..[331]: n is a, t, c or g
agaagggccttgcaggcatgagcctcacagaggtgcaaatggcagtgccaacacattgaataggatgtggagaatgtacacttccagtcacaggaaagctcaggtgctgcgttcagggtgcccttccctatgtaaaggtaatagggagtggaaaatcacactcatccttcaccggtccgtgcggccttgcccttttcggcagcctggtgagaggtccatgtggtgaggctgtaagccctgcaacacgcgcatgagtgaatttgggagtgattccccaacgtcatccttcggatgagaccacagccctgcctgacagctggatgtagcctcntgaagaactgctgagctgcagccacacttctgcccccacagcaatggtgagacagtaaatgcctcttttgttttttaatgccagtaagtttgggggtaatttgttatgtactaaaggtagttagtacacctcgtaaaaaattgaaacatactatttcattctgagtaacatgactgccacactttgaagtgattagtcttcaatgagtatccctcctaaaacataagtgtgatcttaattttagacatcaagattatccaggtaaagtgggcttttgcataacattcaagaatatgaccctcacctctcagggcctttgtattcacaatt

SEQ ID NO: 3101 - DNA, 661 bp, Homo sapiens
  misc_feature [331]..[331]: Chromosome 6, SNP identification no. = rs9348171
  misc_feature [331]..[331]: allele = a, in linkage disequilibrium with rs10484524, respectively
  misc_feature [331]..[331]: n is a, t, c or g
aagaaaacaggacgaaagccaaagggaagagggtctctcccacatatcatcttcatgcctgggaggaggccggcctccccttcccagtggggaagcccctgcagttccagcccacctacccctgctccttcagtcccactttctctccctctcccccagcccaacctgccatctctcagccctggtcctgccccagtttccacgctgttaatcagctgcctttaaagatgttcgtggcacagtcgtacctgcaaaggtaaccaatcccacaagagcagagaggctgtgacacccggcaaggccctggaaaatcccctccccagccccagcncgacgtgctcctgagatcagccctgctgggtggtcccctccacagccatggacaacatgcaggctccttccttctcggtgggttaagacataaggaactcaccaataggaaatatgaagatctagtaaagtttcctctcatttcaatcctattttgtgcctgtttccagttccactcactagaattcctcaacactgtcccaatatttgtttttgtgttttagcactcctattttaaatcgggaggaatgctttcacttttccagttattccttatttgtttcatcctgtttgttttttggctattgtgtcatatcttcacagtctctct

SEQ ID NO: 3102 - DNA, 661 bp, Homo sapiens
  misc_feature [331]..[331]: Chromosome 6, SNP identification no. = rs2281143
  misc_feature [331]..[331]: allele = c, in linkage disequilibrium with rs10484524, respectively
  misc_feature [331]..[331]: n is a, t, c or g
agcaatccttgctttctttgtgtcgttgttgctagtgtttatctccacactcccacccagttttcttcttgggattccacttattcgacagctaattatggagtccctcctccctctcactctgttctagaccctggagttcagcagtaaacctgacatgttggccctgccctcggagcttgctccctgcccctgcctttccccagggctgtctcaccctctctatgcttcccctgtgctgcccacaccggaccccacctgtgggcattctaggctccgatgaagtagggaaaagacactccccatggctctggatttatgatgtaagccnaacgtggatactgagccagacacggagcagtgactttccattttcctacgacacctcaataccaatgttttattaaattgaaaggactaaaaacaactaagtgacgcatgagtctttatttttaattgagcttttatgttcctcaattcattaatgaagaagaaaaggagaaagctggtacattttattgcctgtaattttcaagcggaagtttattctgaaacatatttcaacatcacattccttgggtaaattgcctgtagcttaaacataacagcagcatctcaaaaccctcagaactctacttacgaatgaaccagattttactat

SEQ ID NO: 3103 - DNA, 661 bp, Homo sapiens
  misc_feature [331]..[331]: Chromosome 6, SNP identification no. = rs10484524
  misc_feature [331]..[331]: allele = t, c
  misc_feature [331]..[331]: n is a, t, c or g
cagcgcttggatcttctcccacagaagcacagctgccagctgtggtctcaggctgggcttcaccgagggcaagcggcgagacccatctgacgtccatcagctggtaggccttcccctagtttctcgttgcatttcttcattcatgccttcacttacctacttcattcatgccttcaactcattggtttgggtctaaggaatgtggttataaagctggaacccacatgatcacctggcctttgagaagaaacagagaaggggaaaaagggcttaggatgtggtcaaatgcatgggttgtctctttactgaggtaggtggtggtcatagggcnctctgaggacaggcagtagggctgttattttgctgggtgtggggagacaggttccatttcatggtttccgatgaatgagcttgtcccggctatgaagcaatccttgctttctttgtgtcgttgttgctagtgtttatctccacactcccacccagttttcttcttgggattccacttattcgacagctaattatggagtccctcctccctctcactctgttctagaccctggagttcagcagtaaacctgacatgttggccctgccctcggagcttgctccctgcccctgcctttccccagggctgtctcaccctctctatgcttcccct

SEQ ID NO: 3104 - DNA, 661 bp, Homo sapiens
  misc_feature [331]..[331]: Chromosome 7, SNP identification no. = rs10755848
  misc_feature [331]..[331]: allele = c, in linkage disequilibrium with rs10241890, respectively
  misc_feature [331]..[331]: n is a, t, c or g
tgcgtggggccctacagacctgcctttccctgcccaacctccttctctgaccaagacaaaactgcaggttcactgtggcaggtgattacaacggacagagggtttgttcccatactccatctaccagtggtgacacttcctttcccttcagctcacctgctcccccaactctttgaagaaatctcagtaattcactgagatcagagtctatcacacaaacatccgaaattgtagcacaccggggagcctgccaggaaggcctataatcagataacacattccagcccggagacctttccagaggaagggttaagctcccaaggtagttagnggaaatcaaagaactgcatgctctcattatctcataacaaacataccaggttaatagctgtcgctgccgctctaaaccacgtgtgttgtgttttgtgagtgctgacatggggcgttctttctcccaccatatctgcaacttgacagtgtcatcgtggttgggtgctggagtctcctaaagtgttttgcatactgtctcctgcacgttgcctcgaaggatttttaaataattgctgtgtttaatgggaactccttcccctctctaatcccctccagtagaaaagctggccagtgtgccagtgtgcccggggggcatttatttatagcagga

SEQ ID NO: 3105 - DNA, 661 bp, Homo sapiens
  misc_feature [331]..[331]: Chromosome 7, SNP identification no. = rs10807829
  misc_feature [331]..[331]: allele = t, in linkage disequilibrium with rs10241890, respectively
  misc_feature [331]..[331]: n is a, t, c or g
ctgaccaagacaaaactgcaggttcactgtggcaggtgattacaacggacagagggtttgttcccatactccatctaccagtggtgacacttcctttcccttcagctcacctgctcccccaactctttgaagaaatctcagtaattcactgagatcagagtctatcacacaaacatccgaaattgtagcacaccggggagcctgccaggaaggcctataatcagataacacattccagcccggagacctttccagaggaagggttaagctcccaaggtagttagtggaaatcaaagaactgcatgctctcattatctcataacaaacatancaggttaatagctgtcgctgccgctctaaaccacgtgtgttgtgttttgtgagtgctgacatggggcgttctttctcccaccatatctgcaacttgacagtgtcatcgtggttgggtgctggagtctcctaaagtgttttgcatactgtctcctgcacgttgcctcgaaggatttttaaataattgctgtgtttaatgggaactccttcccctctctaatcccctccagtagaaaagctggccagtgtgccagtgtgcccggggggcatttatttatagcaggaacgaaagtggagcgtcccaaaagactgtctgcttgtcctgagctgg

SEQ ID NO: 3106 - DNA, 661 bp, Homo sapiens
  misc_feature [331]..[331]: Chromosome 7, SNP identification no. = rs7812211
  misc_feature [331]..[331]: allele = a, in linkage disequilibrium with rs10241890, respectively
  misc_feature [331]..[331]: n is a, t, c or g
ctgcatgctctcattatctcataacaaacataccaggttaatagctgtcgctgccgctctaaaccacgtgtgttgtgttttgtgagtgctgacatggggcgttctttctcccaccatatctgcaacttgacagtgtcatcgtggttgggtgctggagtctcctaaagtgttttgcatactgtctcctgcacgttgcctcgaaggatttttaaataattgctgtgtttaatgggaactccttcccctctctaatcccctccagtagaaaagctggccagtgtgccagtgtgcccggggggcatttatttatagcaggaacgaaagtggagcntcccaaaagactgtctgcttgtcctgagctggcaaggagcaaggttggatgcccagctgtcctggaccaccccttcccatggctcctccagcctcctctctcctgcttgcaccctggagcttccttccaagcaggatgggggtgggggtgacagagacagccccagaaggcagggactgactgtgggggacccacaaggcttgtcaggcccctcccttcccatcaacccctgagtgatgccagggcccctgggcaggtgctgccagggcttaggacacaaggacctgtgtcctgtgtgaattttgtgaattctgtgtgaattttgtgaat

SEQ ID NO: 3107 - DNA, 661 bp, Homo sapiens
  misc_feature [331]..[331]: Chromosome 7, SNP identification no. = rs10951110
  misc_feature [331]..[331]: allele = a, in linkage disequilibrium with rs10241890, respectively
  misc_feature [331]..[331]: n is a, t, c or g
tttctccgtgggacacatcacagccttctgtgcgtaggaccctagacagcacttcagtgctatgttcgaggggcatttacacagcaaaatcgctgacagaaagcatgaaaataagaaaaatgtggcattaaacagtcctcgaaaaggacattgaacaagaaggcagggtgtcaccttgctcagcctcagatgggactgtgtatggaggaagactcaaatctttcgtttctttgtgcatgtttgcaattgacctggaaaaccctaagagcattaatttcggggttacaaataagtgttagcgagtaggtgaattcccaagtacaaaatccanaaatatgaaagacagactgtatgtgcccatgtgtataagcaggacatgaaggcatagctacaggtatagatagctcttctgaaaggacacacacattggtaacagtctctgtttccttgggcagaaggaaaagggaacgggagaaggagggtgacttacctcttactctattgccccttttgtactgcttgaaatttttactctgtgaaagcaatacctaactttttaaaacctaaatgttttaggctgggcgaggtggctcatgcctgcaataccagcactttggccaaggcaggaggatcacctgaggccaggagttcaagaccggcc

SEQ ID NO: 3108 - DNA, 661 bp, Homo sapiens
  misc_feature [331]..[331]: Chromosome 7, SNP identification no. = rs10241890
  misc_feature [331]..[331]: allele = c, t
  misc_feature [331]..[331]: n is a, t, c or g
tttttagaagagaggacagcctaagaaaactaattttcttaagccaggcatgcttgctcatgcctataatcctagcaacctgggaggctgagtcaggaggatctcttgaggtcaggagttcgagaccagcctgagcaacagagtgaggccatgtcaatcaatcaactgagtaatccataaataaataatttaaaaaatgaaaatttcaaaaaacaaatgttacctgtcagcaaggccctcccaatcaggctcattacctctgcaaaaccaccctgcactcctcatctgcttcctggcagtgtccttctagaattcaataccacagacttantatttcatttgtctttctcttccatcagtgggatcagagtgtcagctccatggacacaggcgtttgtatgacttttgttcgcttttgtataagtaactcagacaagagtgctcaacacgtatttgtcaatttgggtctggctctcctgggacacgcgcagaagcatcttgcagtttctgagtgtgcctgagcaccatggggacagagtcaatagcaggttggtgacagttgctcctttcccctcttccttccctgaacaacgttagtgggtctggcctgtgaccccacatttgatgtggcgatttgtccccctgcttccacccttggaca

SEQ ID NO: 3109 - DNA, 661 bp, Homo sapiens
  misc_feature [331]..[331]: Chromosome 7, SNP identification no. = rs10252183
  misc_feature [331]..[331]: allele = c, in linkage disequilibrium with rs10241890, respectively
  misc_feature [331]..[331]: n is a, t, c or g
actaattttcttaagccaggcatgcttgctcatgcctataatcctagcaacctgggaggctgagtcaggaggatctcttgaggtcaggagttcgagaccagcctgagcaacagagtgaggccatgtcaatcaatcaactgagtaatccataaataaataatttaaaaaatgaaaatttcaaaaaacaaatgttacctgtcagcaaggccctcccaatcaggctcattacctctgcaaaaccaccctgcactcctcatctgcttcctggcagtgtccttctagaattcaataccacagacttattatttcatttgtctttctcttccatcantgggatcagagtgtcagctccatggacacaggcgtttgtatgacttttgttcgcttttgtataagtaactcagacaagagtgctcaacacgtatttgtcaatttgggtctggctctcctgggacacgcgcagaagcatcttgcagtttctgagtgtgcctgagcaccatggggacagagtcaatagcaggttggtgacagttgctcctttcccctcttccttccctgaacaacgttagtgggtctggcctgtgaccccacatttgatgtggcgatttgtccccctgcttccacccttggacagaagagaaaatatcagtctctgagtttc

SEQ ID NO: 3110 - DNA, 661 bp, Homo sapiens
  misc_feature [331]..[331]: Chromosome 7, SNP identification no. = rs4534049
  misc_feature [331]..[331]: allele = g, in linkage disequilibrium with rs10241890, respectively
  misc_feature [331]..[331]: n is a, t, c or g
tagttaccttttttttgttttttgttttttgcttttattttttgagacagagtctctctcttgtggcccgggctgcagtacaatggtacgatctcggctcactgcaacctccacctccctggttcaaacgattctcctgcctcagcctcccaagtagctgggactacatgcacgtgccaccatgactggctaatttttgtatttttagtagagatggggttttgccatgttggccaggctggtctcgaactcctgatctgaagtgatccacctacctcggcctcccaaagtgctggtattgcaggcatgagccgctgcgcctggcctgtancaagttccctttgaagcggttcaaaggttaaaacttccgagggctgccagttatcgtcctggtgagtgccccttcccgggtccgattccaaggtctccactgcaggctctggtatgttcagacgcagttcctggaggagaggccctgctggctctgagccgggaacccgccacgacgtgcaaagtcgagattgcaaagacagcgcaggtcacacatcctgcctgactccagattgcacgtcaccgtttattttctgtgccctgtgccagaaaacgagatatgtgccatatgctcgcttacttgtgaagactcagggattctacacacatt

SEQ ID NO: 3111 - DNA, 661 bp, Homo sapiens
  misc_feature [331]..[331]: Chromosome 7, SNP identification no. = rs868990
  misc_feature [331]..[331]: allele = c, in linkage disequilibrium with rs10241890, respectively
  misc_feature [331]..[331]: n is a, t, c or g
aacaagaggagagaacacccagttagacttagcaaatgtccctcggcttagcatatcatcatttcccccagtttccctttatggagatgggctgttttgaagaatgttcaatactataaaataaagctgaaatcaggttatctaggcttccgtggagcctgctgtaggaaagtgcagcacagacgctatttatacagggagggagcatctcggcaagaaacttacaacggacgtttagaattaatttagcaccctgtctgctccgaggacatatgctctgtgtctagaattacagcaccttcaacaccatatgtgagtgctgggtgtggcngggaaagatctcggagcctcctggcacacagacacggaagctccagtgtcagcgacgatcacacctccctatgcgtgcgaatgccagcaatgtgtgtagaatccctgagtcttcacaagtaagcgagcatatggcacatatctcgttttctggcacagggcacagaaaataaacggtgacgtgcaatctggagtcaggcaggatgtgtgacctgcgctgtctttgcaatctcgactttgcacgtcgtggcgggttcccggctcagagccagcagggcctctcctccaggaactgcgtctgaacataccagagcctgcagtggagaccttg

SEQ ID NO: 3112 - DNA, 661 bp, Homo sapiens
  misc_feature [331]..[331]: Chromosome 7, SNP identification no. = rs11768094
  misc_feature [331]..[331]: allele = c, in linkage disequilibrium with rs10241890, respectively
  misc_feature [331]..[331]: n is a, t, c or g
tcacccaggctggagtgcagtgatacaatcatagctcactgcagcctccaactcctgagcccaagcaatcctcctgccttagcctcccgaggagctggaactacagacacacaccaccacacttggctaatttttaaattttttgtagatatgaggactctctgtgttgcccaggctggtcttgaactcttggcctcgagcaatcctcttgccttggcctcccaaagtgctgggattataggtgtgagccaccatgcccagccaaaataccccttttctgtagcctccctaatcccctcaaccaggtgaccagctcagagcccttttcacngtgcactgtctcactgagtccccacgtcactctgtgagtggctgttactatcccactttacagacaagggaatggaagctcaggctgggggcgttcccaaggtccacaggggctgaggggcagggctggtctcacagctgctgtgatgcagaaagtgagatgcgtgaaatcctccagtgcccgagtcctggcccttcccactggtacctgtagagctcctggtgaagactcctgacagaaaagcatgaagcctacagcccctcctgaatgtagcacccctcccatgaggttagatctcctcctgctccagagccgccccatgccagtgag

SEQ ID NO: 3113 - DNA, 661 bp, Homo sapiens
  misc_feature [331]..[331]: Chromosome 7, SNP identification no. = rs4719830
  misc_feature [331]..[331]: allele = g, in linkage disequilibrium with rs10241890, respectively
  misc_feature [331]..[331]: n is a, t, c or g
actctctgtgttgcccaggctggtcttgaactcttggcctcgagcaatcctcttgccttggcctcccaaagtgctgggattataggtgtgagccaccatgcccagccaaaataccccttttctgtagcctccctaatcccctcaaccaggtgaccagctcagagcccttttcactgtgcactgtctcactgagtccccacgtcactctgtgagtggctgttactatcccactttacagacaagggaatggaagctcaggctgggggcgttcccaaggtccacaggggctgaggggcagggctggtctcacagctgctgtgatgcagaaagngagatgcgtgaaatcctccagtgcccgagtcctggcccttcccactggtacctgtagagctcctggtgaagactcctgacagaaaagcatgaagcctacagcccctcctgaatgtagcacccctcccatgaggttagatctcctcctgctccagagccgccccatgccagtgaggagaaggagaaatgcatgtgccgcgtcaaagccctccacaaacgatcaacacagccagaaggtgggtttccagccacacagcagcaagccggggacgtggctcccacacgtggctgaagggctgggaccttctggtctctcgggacagctggctcc

SEQ ID NO: 3114 - DNA, 661 bp, Homo sapiens
  misc_feature [331]..[331]: Chromosome 7, SNP identification no. = rs4722532
  misc_feature [331]..[331]: allele = t, in linkage disequilibrium with rs10241890, respectively
  misc_feature [331]..[331]: n is a, t, c or g
gatttaaccaaatcgtccttggaaacggattggatggtttctagtgttttgctattaccattgctccaaatcaacatctttctacttactcctttgcatattcatgcaaatgtttcttttctttttttttaaattttactttaagttctgggatacatgttcagaacatgcaggtttgttacagagttaggaacaaattggggaggggaacgtggtgactttggtcaggtgcaaagcctggggctgctgggctgtcaaggccttgcgggtccctgagagacactgccccattttcaggctcctctgggtgtcaggctgagaaattagaacnctggccttggctggcaacttcagtctctgagctactacaggatccttcctggctgggaaatgcatgtatctgtggactaggcttgggagccgtaaggtggagcctcaggcagaacggtcccttggacaatgaaaccctttttttccttaacacatcccttttgttttgtttgtttgttctgtttcgttttgagatggagtcttgctctgtcacccatactggagtgcgatggtgctgtctctgctcactgcaaccttcacctcccgggttcaagcaattcttgtgcctcagcctcccgagtagctgggaatacaggtgcctgccaccacg

SEQ ID NO: 3115 - DNA, 661 bp, Homo sapiens
  misc_feature [331]..[331]: Chromosome 7, SNP identification no. = rs2334123
  misc_feature [331]..[331]: allele = a, in linkage disequilibrium with rs10241890, respectively
  misc_feature [331]..[331]: n is a, t, c or g
tatatttcctttcaaatatatataaacagctcctacaaatcaaaaagaaaaagacaaacaatgccacagaaaaatgccacagccgtggtagcgagcaggtttgttactgatggcagtggccgttcctccctccccaccccaggggagccccggtttctcaggtcctcagtgcgctacagatgcttgcttcaagggagtgcccagatgctatgctggggagtctgggttcaccgtggccaccacagtgcgataggttgggtcatagacagtgatgttgtcttgtccatctgctgggggtatagggggtggcaaggaaagcctgtcctcattnttaaaaagagacactgatgctgggtgcagtggctcacacctataatcccagtactttgggaggccgaggcaggaggatcacttgaggtccagagttcaagaccagcctggtcaacatgatgaaaccctgtctctatctaaagatacaaaaattagccgggcatggtggcgcacgcttgtactcccagctactcaggagactgaggcaggagaatcgctcaaacccaggaggcagaagctgcagtgagccgagatcacaccactgcactccaacctgggcaacagagcgagaccccatctccaaaaaaatgaagacactgaggctgggcgt

SEQ ID NO: 3116 - DNA, 661 bp, Homo sapiens
  misc_feature [331]..[331]: Chromosome 7, SNP identification no. = rs2334122
  misc_feature [331]..[331]: allele = c, in linkage disequilibrium with rs10241890, respectively
  misc_feature [331]..[331]: n is a, t, c or g
taaggcttggccttaaataaatacaattcactcaaagcaaagcaataggccaggaaaaatattgttagcacttaccaaagaaaaatgtatatgattcaacatatgtattttgaaaggaatatatatttcctttcaaatatatataaacagctcctacaaatcaaaaagaaaaagacaaacaatgccacagaaaaatgccacagccgtggtagcgagcaggtttgttactgatggcagtggccgttcctccctccccaccccaggggagccccggtttctcaggtcctcagtgcgctacagatgcttgcttcaagggagtgcccagatgctntgctggggagtctgggttcaccgtggccaccacagtgcgataggttgggtcatagacagtgatgttgtcttgtccatctgctgggggtatagggggtggcaaggaaagcctgtcctcattcttaaaaagagacactgatgctgggtgcagtggctcacacctataatcccagtactttgggaggccgaggcaggaggatcacttgaggtccagagttcaagaccagcctggtcaacatgatgaaaccctgtctctatctaaagatacaaaaattagccgggcatggtggcgcacgcttgtactcccagctactcaggagactgaggcagg

SEQ ID NO: 3117 - DNA, 661 bp, Homo sapiens
  misc_feature [331]..[331]: Chromosome 7, SNP identification no. = rs17133145
  misc_feature [331]..[331]: allele = g, in linkage disequilibrium with rs10241890, respectively
  misc_feature [331]..[331]: n is a, t, c or g
acctatcgcactgtggtggccacggtgaacccagactccccagcatagcatctgggcactcccttgaagcaagcatctgtagcgcactgaggacctgagaaaccggggctcccctggggtggggagggaggaacggccactgccatcagtaacaaacctgctcgctaccacggctgtggcatttttctgtggcattgtttgtctttttctttttgatttgtaggagctgtttatatatatttgaaaggaaatatatattcctttcaaaatacatatgttgaatcatatacatttttctttggtaagtgctaacaatatttttcctggcctnttgctttgctttgagtgaattgtatttatttaaggccaagccttaactggaaggatactttttttcctccccaaatcttgacttcatgaataataacagctgcttctctcactgaaaaacaaaactggaggtggcagagggtgggtgaggtcatcgttatcggtttgcaggctttgaggcagagagcatctgtaggtagaggcagctgcggagaagatcatccagggaggctgcagggagcgcagtgctgctggaacctgcagcagggagactattaaagggtccaagccactgcagccccatgaggaggggcccacgcaggaaaagaaa

SEQ ID NO: 3118 - DNA, 661 bp, Homo sapiens
  misc_feature [331]..[331]: Chromosome 7, SNP identification no. = rs4719835
  misc_feature [331]..[331]: allele = a, in linkage disequilibrium with rs10241890, respectively
  misc_feature [331]..[331]: n is a, t, c or g
gtgggtgaggtcatcgttatcggtttgcaggctttgaggcagagagcatctgtaggtagaggcagctgcggagaagatcatccagggaggctgcagggagcgcagtgctgctggaacctgcagcagggagactattaaagggtccaagccactgcagccccatgaggaggggcccacgcaggaaaagaaacggtgttgttagaacttaaagtcccgctgagatggtttccacctgggttcacgaagaaggctccagagacgggttcgttagatgacaaggctgactcccaggtggtgatcgcaaacacgaagacacatctcaagccacagnggcttccgggagccacacaggctgagattggcatgatgggcacaagatctgcctttgcagaggatgccctccctggcgggggctgaggaaacagcccatcaccttccttaggctcctgccctctttgtatggctctgggaggtagagggacttagctgacagttgcgtagtggaacggaggggatgcttggatccctcattggtctcattcaactggtacagagctcaggcgagcaggagggacattattatttatttatttatttagtggagatgaggtcttgctgtgttgcccaggtaggtcgtgaactcctgggctcaagtgatcct

SEQ ID NO: 3119 - DNA, 661 bp, Homo sapiens
  misc_feature [331]..[331]: Chromosome 7, SNP identification no. = rs4719837
  misc_feature [331]..[331]: allele = t, in linkage disequilibrium with rs10241890, respectively
  misc_feature [331]..[331]: n is a, t, c or g
cctgggttcacgaagaaggctccagagacgggttcgttagatgacaaggctgactcccaggtggtgatcgcaaacacgaagacacatctcaagccacaggggcttccgggagccacacaggctgagattggcatgatgggcacaagatctgcctttgcagaggatgccctccctggcgggggctgaggaaacagcccatcaccttccttaggctcctgccctctttgtatggctctgggaggtagagggacttagctgacagttgcgtagtggaacggaggggatgcttggatccctcattggtctcattcaactggtacagagctcaggngagcaggagggacattattatttatttatttatttagtggagatgaggtcttgctgtgttgcccaggtaggtcgtgaactcctgggctcaagtgatcctccctcctaagccttctgataagcgatcctccccaaatgttgggattacaggtgtgagccatcatgcccagcccaagaggggcattatttatttaatggggtttcatctgtaaccccaaatcccccttgccaatgccttgatgtctctggatacagaggtctcccttctggcagctggcctggagtcaataaccacagctcccatgtatgtgctggtcttgctgctccaggt

SEQ ID NO: 3120 - DNA, 661 bp, Homo sapiens
  misc_feature [331]..[331]: Chromosome 7, SNP identification no. = rs6969544
  misc_feature [331]..[331]: allele = c, in linkage disequilibrium with rs10241890, respectively
  misc_feature [331]..[331]: n is a, t, c or g
ctccaaaagtactgggattacagacatcagccactgcacccggccagcagagtctttttgccaaaacgcaaggatggtctccagagtcccggtttctctgcagctggggaatacttttctgatttcagtctggagtaccagttttctgaagtgaggactgtatcggccaaatcttagaaggagaagatcacgaaaaagcgtctgcagaaagagaagaaaggggtggtacactgcggaggaggagggtccactccagaggctgcaggtgacacacgggaccccctccatggatgttgctatggtttaactataaatgtccctccaaaatgcntacattggaacctaatacccaatgtgaaggtattaagaagtggacctggccgggtgccgtggctcatgcctgtaatcccaacactttgggaagctgagttgggaggatcgcttgagcccaagaatccaagaccagcctgggcaacacagggagacctcatcccagtaagaaattaaaaagttagctgagcatggtgctatgctcctatagtcccagttactcgggaggctgaggtgggaggatcgctggagtccaggaggtcgaggctgcagtgagctgtgattgcaccactgcactctacagcctgagtgacagagtgaggccctgtct

SEQ ID NO: 3121 - DNA, 661 bp, Homo sapiens
  misc_feature [331]..[331]: Chromosome 7, SNP identification no. = rs10499325
  misc_feature [331]..[331]: allele = t, in linkage disequilibrium with rs10241890, respectively
  misc_feature [331]..[331]: n is a, t, c or g
ctttgcctatggagcaaccacccttttattcctttgctttcttaataaatttgctttcactttactctgtcagctcactcttaaattccttcctgcatgaagccaagaacccatgtggcatctcagggtgaacccaagttttggggttcaccacgtgatagccagaagtggtcacatgatgccacttgggggtacctaagcggtgcggctgggaaattgggggtaggggattgaactatctccacttcgggtcttgttcttcccatctgaattaagaacagataaccaacccgagatcagtatatctttagcttaatatcaatacagcacnatatgatttcagaggatgctttgccatacatatgacctcgtgtgtcaccaggaaatatgagagctgaatgttaacaaagtagagattcaaaggaaaaaaggcccaaggactgattggctcacaaatgtgctccagcattagggtcctgagtgagatgaatgggcccaggcctagcgagctaacctcctctcacctcagtgggccagacgcagatgggaaccgtgtggccatggctgccctaagccaggatgaggctgaagaggcaacctgtgtctgttaccatctgctcttgcaaatatcttccttgggtgtggtgtttctggagcctgt

SEQ ID NO: 3122 - DNA, 661 bp, Homo sapiens
  misc_feature [331]..[331]: Chromosome 7, SNP identification no. = rs12666681
  misc_feature [331]..[331]: allele = t, in linkage disequilibrium with rs10241890, respectively
  misc_feature [331]..[331]: n is a, t, c or g
gagtggggtttttataagcagacttacaaaagtaaaacaaaagcagttaatcatatagtgtataatttgtggccttgtagctgcgtcaaaagaaaaacaagaactggctaaatacagacatttgtaaaacataatcacgtttaagaagcctgggaaaggagtaacagtaaagtaatttatctttttctctttttttttccttcaacattgctctgggggagaggggtgtctgaagcccattcctttggccttggctgctcgtacagcattatcttataactgtccttgaagtgtgcttgctaggcagaggaaaacttctttttttcttgtnaacccttgcctgttacttttcttggagtgaatgaatgcatatttatttttaaatttctgcctcattagagccacctatgaaagcagactggatcgctgagtcactcagtggaagcctgtttcaaaacacagtgtatcagtagaaattttgaggtatagtgaagccaacagatcaggagatgattgctattgaaaaagtagtttgttactcacagttcccaggaggaggggacaccgcctgccacgccacacagagccacacggggaagcaccaaggtcagttaggaggtggagggaaaagaaggctttgtttggtttgggtgggttgttt

SEQ ID NO: 3123 - DNA, 661 bp, Homo sapiens
  misc_feature [331]..[331]: Chromosome 7, SNP identification no. = rs12673364
  misc_feature [331]..[331]: allele = g, in linkage disequilibrium with rs10241890, respectively
  misc_feature [331]..[331]: n is a, t, c or g
ctaaatacagacatttgtaaaacataatcacgtttaagaagcctgggaaaggagtaacagtaaagtaatttatctttttctctttttttttccttcaacattgctctgggggagaggggtgtctgaagcccattcctttggccttggctgctcgtacagcattatcttataactgtccttgaagtgtgcttgctaggcagaggaaaacttctttttttcttgtgaacccttgcctgttacttttcttggagtgaatgaatgcatatttatttttaaatttctgcctcattagagccacctatgaaagcagactggatcgctgagtcactcngtggaagcctgtttcaaaacacagtgtatcagtagaaattttgaggtatagtgaagccaacagatcaggagatgattgctattgaaaaagtagtttgttactcacagttcccaggaggaggggacaccgcctgccacgccacacagagccacacggggaagcaccaaggtcagttaggaggtggagggaaaagaaggctttgtttggtttgggtgggttgtttgcatctgaaaagtgctgtcatggcaacttgtatctctagaaattggctaactctagggggtcagcgaggccccagatgtcagagcattggaatgcaggaaataaaag

SEQ ID NO: 3124 - DNA, 661 bp, Homo sapiens
  misc_feature [331]..[331]: Chromosome 7, SNP identification no. = rs2280650
  misc_feature [331]..[331]: allele = g, in linkage disequilibrium with rs10241890, respectively
  misc_feature [331]..[331]: n is a, t, c or g
aaatgccatcctcccttccagcactcagggcagacatcagcaatcgatcgacattctttgcatcagaggccagattgagcctcagaggccttttcaacacagctcttcaggcaacaaatatccaagggcccaaattggtgtgcaagtcgatttatatgtcatttctgttttaagaggttaaggacgtcgtgttctctttctagaagtatttttactttagaaaaaagaaactgcagagtgaggacaaaatttagtcaaagaaattaatagctaatggtagaattttagtctgcagaagttttgggaaaggaagtctgtgcaagtctctcantcctgtctccgttgtcacaaaaaaatgtttacgttgtttattttccaaggcaaggtaaacaccatggagcaagagacagttgtttccatggtaagctccacccacgatgtctccctttgtatcccccacaatgcccacaatcgttcaggcaaagaataggtgctcactaaatgtgtattgattgaatctaaattgcaattttatccaacaccctcagggaagccaactggaaactaaactcacccccatatattgctgaaacgcattgattaccaagaagccaatgtatgacagccccaacttgtgagacgcgttttttccaaagccacg

SEQ ID NO: 3125 - DNA, 661 bp, Homo sapiens
  misc_feature [331]..[331]: Chromosome 7, SNP identification no. = rs17167883
  misc_feature [331]..[331]: allele = t, in linkage disequilibrium with rs10486058, respectively
  misc_feature [331]..[331]: n is a, t, c or g
tcataatcttcatgtgtcattggagggatctcgtgggaggtggttggatcaggcggcaattcccacattctgttctcttgatagtgagtgagttctcatgagatctggtgattttataaggggctgttccccactttgccctgcacttcactctcctgttgccatgtgaggaaggacatgtttgcttccccttacatcatgagtttaagtttcttgaggtctccctagcaatgtggaactgtgagtcaattaaacctctttcctttacaaattacccggtagcaggtatttcttcatagcatcatgaaaatggactaagacaatgagatgnataggttggaaaatactagaatatgtcccacgtaatgataagtgctatttcatgaaaattgtattttggctctttctcttcccgtgtgtgtatgtgtgtttgtgatggtgtgtgggcatatgtgtatatgttactggatgatgaagttggacatatttcttgctctattctgtgtgtaaaagtttgaaaggcacttgtgccatgctcttcaactcttgcacataatgactctaccttaatttttgtctctataatccagattggcttttttttttttttttagtttctctgtgataattttatcttgaaccctctcaaataaacagaata

SEQ ID NO: 3126 - DNA, 661 bp, Homo sapiens
  misc_feature [331]..[331]: Chromosome 7, SNP identification no. = rs17167884
  misc_feature [331]..[331]: allele = a, in linkage disequilibrium with rs10486058, respectively
  misc_feature [331]..[331]: n is a, t, c or g
aattttatcttgaaccctctcaaataaacagaataatgaaaagcagttcctcaacattgttcatctttcttttacaatttatatctttgtagtttgactattttgaaccaagtacaaatagcatttgggctggagtgtggtttacccagaaagttaggcaaaagctctacattatactttgttcacataactcagaatacaccttcgagaaaatcaaacaaaaaatgtgggcaatgaatagaatcaaaaaagaaggaagctgctggagtttgaatgccattattataaactaaatcccatcttaatcacttgcttgatgcccaagaagaanaacatacaaaataatattcaaaggcctgccgataaggtacaacctccttttcacaacttctgagttttgattatttgatgatcttttctgatttccttctttatacaagtgttttttagctaccgttgggatattttacaaacagtggtaaaacgttagagcctgaaggaaaaacaatgagttggatctttcaccttctatggcattcatgttgaaagagtacattagggcatatgaattgacagctttagataaattattcaaagccctctatatattttggttgatcaggggcaaagcctttttctccaagatgttccacctgacttt

SEQ ID NO: 3127 - DNA, 661 bp, Homo sapiens
  misc_feature [331]..[331]: Chromosome 7, SNP identification no. = rs17167885
  misc_feature [331]..[331]: allele = t, in linkage disequilibrium with rs10486058, respectively
  misc_feature [331]..[331]: n is a, t, c or g
tttcttttacaatttatatctttgtagtttgactattttgaaccaagtacaaatagcatttgggctggagtgtggtttacccagaaagttaggcaaaagctctacattatactttgttcacataactcagaatacaccttcgagaaaatcaaacaaaaaatgtgggcaatgaatagaatcaaaaaagaaggaagctgctggagtttgaatgccattattataaactaaatcccatcttaatcacttgcttgatgcccaagaagaaaaacatacaaaataatattcaaaggcctgccgataaggtacaacctccttttcacaacttctgagntttgattatttgatgatcttttctgatttccttctttatacaagtgttttttagctaccgttgggatattttacaaacagtggtaaaacgttagagcctgaaggaaaaacaatgagttggatctttcaccttctatggcattcatgttgaaagagtacattagggcatatgaattgacagctttagataaattattcaaagccctctatatattttggttgatcaggggcaaagcctttttctccaagatgttccacctgactttcttcagggaaatgttgcagaggttagcatggcctggaaggtgtgagtagcatagcatggaaggtt

SEQ ID NO: 3128 - DNA, 661 bp, Homo sapiens
  misc_feature [331]..[331]: Chromosome 7, SNP identification no. = rs17167886
  misc_feature [331]..[331]: allele = a, in linkage disequilibrium with rs10486058, respectively
  misc_feature [331]..[331]: n is a, t, c or g
ggtttacccagaaagttaggcaaaagctctacattatactttgttcacataactcagaatacaccttcgagaaaatcaaacaaaaaatgtgggcaatgaatagaatcaaaaaagaaggaagctgctggagtttgaatgccattattataaactaaatcccatcttaatcacttgcttgatgcccaagaagaaaaacatacaaaataatattcaaaggcctgccgataaggtacaacctccttttcacaacttctgagttttgattatttgatgatcttttctgatttccttctttatacaagtgttttttagctaccgttgggatattttncaaacagtggtaaaacgttagagcctgaaggaaaaacaatgagttggatctttcaccttctatggcattcatgttgaaagagtacattagggcatatgaattgacagctttagataaattattcaaagccctctatatattttggttgatcaggggcaaagcctttttctccaagatgttccacctgactttcttcagggaaatgttgcagaggttagcatggcctggaaggtgtgagtagcatagcatggaaggttttatttcatgtttaacttatttggtagtattagtaatgtaaacactttcagatagactaaggaaagattgtga

SEQ ID NO: 3129 - DNA, 661 bp, Homo sapiens
  misc_feature [331]..[331]: Chromosome 7, SNP identification no. = rs9639178
  misc_feature [331]..[331]: allele = c, in linkage disequilibrium with rs10486058, respectively
  misc_feature [331]..[331]: n is a, t, c or g
aacatttattttactctcctgatgaacttgcttttcaaatattctctaaggacaggagaaattaatagtaatgagctcatttagaaagaaatgggatcgtgatcattttggctttgttcactttgcagtaatggctcctgctcattttattttcaggaattttgcttaggcaaggtgctgagtgcagcaaggtgcttttcactaaaataaacttattgaattttggtgagcctctgggacaaaaaaggaaagacaattgcctataaaatgtggaattgttatcttttggcgaagaagaacagtaggtgtatgcagcttctaagtgataaanatgtacgtttctaacttcatttgtacacctgccaaatctccccagcagctgtctttattacagccatctgagcactaagagaacaagtccaaaatttcgtaaacaacatgcgtcataactaaactttcaaaaggtttttatatcataagttggtaagtttctgacagcatgcatagtaaattttagagtgcaaactttgtggagatctttttttgtttgttttacataaacactatggtttcagaagagagcacatttaataaatgagaaggaaaacaacagagtcactttcatgaaccaaagtatctgtaccgcttagagagatgttgg

SEQ ID NO: 3130 - DNA, 661 bp, Homo sapiens
  misc_feature [331]..[331]: Chromosome 7, SNP identification no. = rs4445122
  misc_feature [331]..[331]: allele = t, in linkage disequilibrium with rs10486058, respectively
  misc_feature [331]..[331]: n is a, t, c or g
aaatgggatcgtgatcattttggctttgttcactttgcagtaatggctcctgctcattttattttcaggaattttgcttaggcaaggtgctgagtgcagcaaggtgcttttcactaaaataaacttattgaattttggtgagcctctgggacaaaaaaggaaagacaattgcctataaaatgtggaattgttatcttttggcgaagaagaacagtaggtgtatgcagcttctaagtgataaacatgtacgtttctaacttcatttgtacacctgccaaatctccccagcagctgtctttattacagccatctgagcactaagagaacaagnccaaaatttcgtaaacaacatgcgtcataactaaactttcaaaaggtttttatatcataagttggtaagtttctgacagcatgcatagtaaattttagagtgcaaactttgtggagatctttttttgtttgttttacataaacactatggtttcagaagagagcacatttaataaatgagaaggaaaacaacagagtcactttcatgaaccaaagtatctgtaccgcttagagagatgttggctagtaagactgtcttaacttaatattcttacggagatgatcatatcctgtcacaggctattattttcaatgcacgcagttttagata

SEQ ID NO: 3131 - DNA, 661 bp, Homo sapiens
  misc_feature [331]..[331]: Chromosome 7, SNP identification no. = rs4321890
  misc_feature [331]..[331]: allele = t, in linkage disequilibrium with rs10486058, respectively
  misc_feature [331]..[331]: n is a, t, c or g
aggaattttgcttaggcaaggtgctgagtgcagcaaggtgcttttcactaaaataaacttattgaattttggtgagcctctgggacaaaaaaggaaagacaattgcctataaaatgtggaattgttatcttttggcgaagaagaacagtaggtgtatgcagcttctaagtgataaacatgtacgtttctaacttcatttgtacacctgccaaatctccccagcagctgtctttattacagccatctgagcactaagagaacaagtccaaaatttcgtaaacaacatgcgtcataactaaactttcaaaaggtttttatatcataagttggnaagtttctgacagcatgcatagtaaattttagagtgcaaactttgtggagatctttttttgtttgttttacataaacactatggtttcagaagagagcacatttaataaatgagaaggaaaacaacagagtcactttcatgaaccaaagtatctgtaccgcttagagagatgttggctagtaagactgtcttaacttaatattcttacggagatgatcatatcctgtcacaggctattattttcaatgcacgcagttttagatacctgattccctattttcttgtttgaaaagcttggaggaaatattttctttgtttctcgtggagatt

SEQ ID NO: 3132 - DNA, 661 bp, Homo sapiens
  misc_feature [331]..[331]: Chromosome 7, SNP identification no. = rs9639181
  misc_feature [331]..[331]: allele = t, in linkage disequilibrium with rs10486058, respectively
  misc_feature [331]..[331]: n is a, t, c or g
gtttttatatcataagttggtaagtttctgacagcatgcatagtaaattttagagtgcaaactttgtggagatctttttttgtttgttttacataaacactatggtttcagaagagagcacatttaataaatgagaaggaaaacaacagagtcactttcatgaaccaaagtatctgtaccgcttagagagatgttggctagtaagactgtcttaacttaatattcttacggagatgatcatatcctgtcacaggctattattttcaatgcacgcagttttagatacctgattccctattttcttgtttgaaaagcttggaggaaatatttnctttgtttctcgtggagattcttcaaggcgatgatcttaagctgaagtctgaccaactcaggaatttgcttctccaatgtaagcattataaggtagaatttggaagtatccttatttgtcaccctttatttttcattggtgttggatgacatagaaggatggaactgtatatgagttaaacaaaatttgtttttgtaccagaagagcaggtaaaacagaacatacatatttttgaatttttaaagttgcacgtctgtcagattctgaggtctcctgatagactagataattgatggactttcaaagctgtcacagttaggtttgaattca

SEQ ID NO: 3133 - DNA, 661 bp, Homo sapiens
  misc_feature [331]..[331]: Chromosome 7, SNP identification no. = rs4721304
  misc_feature [331]..[331]: allele = a, in linkage disequilibrium with rs10486058, respectively
  misc_feature [331]..[331]: n is a, t, c or g
atgttgagacaatgatggattttaatacttaccttatatgactatcgtgaaaatcaaattgagtgatgtatgaaatacctaggcgtgtgccttattgtaggtgcttgagacatcctatgttaatctctttccatttaataacaagagggggacgaggtagctaaaaagttaatgaatataaataggaaaagatgttttatataaaatatagtaattgaatcagatggtattaggagaaaataattaagtaaagccaaacacttagtaattgaaaactagtttattgaactcttattatgtgcctgacactgttttaagttctttacatacntcatcacagccagtcctcacaaaagccctgtgacagtgattactcacattttaaaaatgagcaaacaagcctggagagatttagcgctatgctcttctttttggttaatgctaaatattgctctcattacatatataagataaagaaaaagcacatgcaacccatgtacataaataggtaggcaagttctggctcattttcttaaaactcttattttctaatttgacctaagacagaagaggaacgtaagaatgttccatattttggtttcaagtaagacatttaaattactggcaggaagttagatactgttttgaagtactgtttgtt

SEQ ID NO: 3134 - DNA, 661 bp, Homo sapiens
  misc_feature [331]..[331]: Chromosome 7, SNP identification no. = rs17167896
  misc_feature [331]..[331]: allele = g, in linkage disequilibrium with rs10486058, respectively
  misc_feature [331]..[331]: n is a, t, c or g
gactaagaaaacataatttggaaaaagaaaataataatttttatttgatgttaaagcaaatttttataaagctacaatgaatctgaaaatattttttcttagaactgatgtgtattttataaatagctagtcttatttcggtataaattaatgacaacatctatctatgaaatgtaatacgtcactgctagggtattaaataagcaaagataggaaagttgaaagctaggtgtatgtataaattgttacatatgtgtaagtaaataaatatatatgtatatgtatgcatatatatcaaaggtttgagagagctactgactcttaaaaaacnaaatcagaaaaaaactgtggaaaataccatgaattaaagtctacctattctaaaccaaattagagttacaaaaatgttgaactcatgaattctctttcatttaatgcatttcagtctcctctgtgatatgcaaataactatcctgtacttttaaagcgttttcttttagaacttctcaagagtttctttattcttcatttgaattggttttactagtgaatttcacttcagacaccatgggcttgtagcccaaggatctggctggcctccttttttacagaaggaaatggtcatagacgatgcttctttctattgaattcagtagtaaaa

SEQ ID NO: 3135 - DNA, 661 bp, Homo sapiens
  misc_feature [331]..[331]: Chromosome 7, SNP identification no. = rs17167898
  misc_feature [331]..[331]: allele = c, in linkage disequilibrium with rs10486058, respectively
  misc_feature [331]..[331]: n is a, t, c or g
tggtcatagacgatgcttctttctattgaattcagtagtaaaatctttcattgccatctgcttctgatgacatctgaattttttgttatgaacagatttgctttttataatggctgaaatcagagtactatttttttccccctggaatttccttttaagtttcactctgcatacctttttaaaaaattcagtattcattatttatacttctcaagttcatggcaaactcccttgaaatataaacactgcatcattcatttctgtttcctagtggcacagttcaaatgcaataataacgattagtgcaagggcagcttttacttcttttctnatttatcgccgcatatttcttctgtgccttcttttccttctctttttattttcattttttcaggattttggaattatatctggctgactgcaaatccagtgagctttctgctattctaggttgtttcttaaaggaaagattatgtaaaaactaaacccctacatatcaaagacctggtaataaatattctgcactaatgtgggtaacatgatcaattgcttgatcactgaatcagtaatatcagtttcagtgggaaatattaatcaattttgatagaatgcaataatctacagttggcactggcaaggggattctgaaggaggggaagaa

SEQ ID NO: 3136 - DNA, 661 bp, Homo sapiens
  misc_feature [331]..[331]: Chromosome 7, SNP identification no. = rs10486058
  misc_feature [331]..[331]: allele = t, a
  misc_feature [331]..[331]: n is a, t, c or g
ctccttttggtgggggaatcaccaggaccctgtaatatgtgagggaaggtaggatgacacagagtgaggccaagatgagttgtgaaatacaattgtgttgttgcacccactaggtgacagggttgaagattgtcttgcaagcttgacaatctgcttgtgctgatgtctgtgctggtgtaagtgcttgacagtcctgcaggagccacaacaccccaagtggaagctctgaagctgcatttctctcccttactcatgcctgaccattactacccgcaaatatgacaccatgcaatgtttgctctgcggaatttggctttctccttcacgtaancattgcacacataccagctctccttcattaccactagacttgtcacaaacaaaaacatcagcttaaattctacttttcttcaatattttattttaggagattgtttctttttcctactagtaggccttttgggaaatatcctgtttcactcttgcttccttatctttaaatttcagggaggagcaaaggggtgagatttctgtccaatgtctcacaatcatctcattatttccttctcgtttcctgtaaccagtgaggaaaagcaagaacctcaagaactcatagtcgtgatggattcacaggaagttttattatatccttttataggtc

SEQ ID NO: 3137 - DNA, 661 bp, Homo sapiens
  misc_feature [331]..[331]: Chromosome 7, SNP identification no. = rs17167901
  misc_feature [331]..[331]: allele = c, in linkage disequilibrium with rs10486058, respectively
  misc_feature [331]..[331]: n is a, t, c or g
catgggccctaagaatatgcatttcttgcaaattcccaggtgatgctaatgctgctagtatggggcccatgttttgagaacctctgttctaaataaaattgaggtgactaatggaaattactcttattggccactataatagctaatacacctaaagaagtaataagtaaccatcttaatttctcctcaggataaataactcaatcatatttaatcttccaattaatatcactttaatcaattctactgctcttccttaaattctctgggtaaaagaaattaccctgaaaatataaaagttaaaattggtcaccatatgttaataagggcntaatagtgaattaattggaagcagcattcctcggctcttgcaaataacccaataactttaaaatatccaagtgtcatattaactttttaggttaaagtataatgttgctcatgaaaggctccattaggctacttagctaatccagcacaaaatgcattgttcagatttcctgttttctaagtatgtatagagagaggtagtctatttttcttttaatgttttggtttttttttcctccaacttttattttaagctccggggtcatgtgcaggatggggaggtttgtgacacaggtaaacatgtgccatggtgagctgctgcacagatcaa

SEQ ID NO: 3138 - DNA, 661 bp, Homo sapiens
  misc_feature [331]..[331]: Chromosome 7, SNP identification no. = rs17167905
  misc_feature [331]..[331]: allele = t, in linkage disequilibrium with rs10486058, respectively
  misc_feature [331]..[331]: n is a, t, c or g
cacctgactgcaatctcttccatttctcaattaagtttactttgccaaattgtgtgtggtggcctgcgtatgtgtgtgaagaaatgagtgttagacaaaacttgtcttgctctaaaaaagcctctaaaaggtagacaccacagattgagaacaagagaaaaaaaccatatctatgatataacaacgttaaaagaaatcccagatatttagaactacatctgttaaggtgatccaaaatattacaagccaaaacccaactaattcttcatggatatgcaaatagagctcatggcacgtagtttctagagagcacagaaaaagttgcaaatanatataaacattttgaaaatattatttagcccatctgcagctttttatagattctaagtgctttaaactcctattttatctgttattccttacaccaatccattataagtcacaaatttgttttatggctggatacagtgaaacaagctttgaatgcattaacaagttctctagtgaacaagtacacattaaaagacatgcattttctaacatagtaaggatagaagagggtagtaaagaaaatatgagggcagaagccttggaattccttggagaattctgagttgtgctagaagggtcttctaggtcagctattatccaacaacgtttt

SEQ ID NO: 3139 - DNA, 661 bp, Homo sapiens
  misc_feature [331]..[331]: Chromosome 7, SNP identification no. = rs10486057
  misc_feature [331]..[331]: allele = t, in linkage disequilibrium with rs10486058, respectively
  misc_feature [331]..[331]: n is a, t, c or g
taccagcaacatcttatcaaaatcatagtccagagttcagttaggtgggtggtggtgaagaatggaccacacattggtagaaaacgttgttggataatagctgacctagaagacccttctagcacaactcagaattctccaaggaattccaaggcttctgccctcatattttctttactaccctcttctatccttactatgttagaaaatgcatgtcttttaatgtgtacttgttcactagagaacttgttaatgcattcaaagcttgtttcactgtatccagccataaaacaaatttgtgacttataatggattggtgtaaggaataacngataaaataggagtttaaagcacttagaatctataaaaagctgcagatgggctaaataatattttcaaaatgtttatatatatttgcaactttttctgtgctctctagaaactacgtgccatgagctctatttgcatatccatgaagaattagttgggttttggcttgtaatattttggatcaccttaacagatgtagttctaaatatctgggatttcttttaacgttgttatatcatagatatggtttttttctcttgttctcaatctgtggtgtctaccttttagaggcttttttagagcaagacaagttttgtctaacactcatttc

SEQ ID NO: 3140 - DNA, 661 bp, Homo sapiens
  misc_feature [331]..[331]: Chromosome 7, SNP identification no. = rs10486056
  misc_feature [331]..[331]: allele = g, in linkage disequilibrium with rs10486058, respectively
  misc_feature [331]..[331]: n is a, t, c or g
aatctactttgaatgagttaggaaaggacaagagtattagaaacacataccagcaacatcttatcaaaatcatagtccagagttcagttaggtgggtggtggtgaagaatggaccacacattggtagaaaacgttgttggataatagctgacctagaagacccttctagcacaactcagaattctccaaggaattccaaggcttctgccctcatattttctttactaccctcttctatccttactatgttagaaaatgcatgtcttttaatgtgtacttgttcactagagaacttgttaatgcattcaaagcttgtttcactgtatccagncataaaacaaatttgtgacttataatggattggtgtaaggaataacagataaaataggagtttaaagcacttagaatctataaaaagctgcagatgggctaaataatattttcaaaatgtttatatatatttgcaactttttctgtgctctctagaaactacgtgccatgagctctatttgcatatccatgaagaattagttgggttttggcttgtaatattttggatcaccttaacagatgtagttctaaatatctgggatttcttttaacgttgttatatcatagatatggtttttttctcttgttctcaatctgtggtgtctacctt

SEQ ID NO: 3141 - DNA, 661 bp, Homo sapiens
  misc_feature [331]..[331]: Chromosome 7, SNP identification no. = rs17167907
  misc_feature [331]..[331]: allele = c, in linkage disequilibrium with rs10486058, respectively
  misc_feature [331]..[331]: n is a, t, c or g
actctcaggaggctcaaagcaaaaaagaaggcattaagactttgtttttcctgctgccagtttgtggctgccggtgtagtaatatcagcagacatggtgactatatgagactccaggttcgtcccagcagcatcaggagagatttaacaccagtgaaaatctgggctcctaagtttctgctaactggtgacattgtgattcccacagctgcagttgcactggtggcacctctcacagttagttgaacaacagcaagcccagggaaagcttttattagaaagggctgttttagctatcagaaagtacaggctacttgctctgcctgcaaganactgttttcttcccttgttatcaaagcagataggctatgcaaagaagccctctgtggaggtatattttagggactaaatgaacatctatatggctgaagaccagaaagcaaggggaaggagtagtaagagaaaaggctggagaagaaggtaggtgaatgaatatgcagagaattctaagtaccttctgatagcacagagaagccagaaaaggatttgatacatacatattttccgtttttcatttcaaaatgttaactttgaactttgccattaaaagattgccacataatatatgggaagttttgttccagattacttgaaatggagtt

SEQ ID NO: 3142 - DNA, 661 bp, Homo sapiens
  misc_feature [331]..[331]: Chromosome 7, SNP identification no. = rs6964584
  misc_feature [331]..[331]: allele = g, in linkage disequilibrium with rs10486058, respectively
  misc_feature [331]..[331]: n is a, t, c or g
tgtgatggctacaatgccatactaaccaaattctcttttaatttccttaattttggcacacagaaaatctagctttttcacttccttgcagttaggttagggccatgtggatggggtctggtgtgacttgttctgctaatagaatgtgagcagatacgatgcaagccacttacatgcctgttggtaaaggatctctatgtttatccccactctcctttttttctgtagtcacctcagaggccttatgcttaatttaacagcatcatatcatccaattcatgagaaattataatgtgagtgagaaatagacttttcttttttgttcgtgttnccactgagatttgtttttttaaacatatgacctaatgttaactaccttggccactagaagacaggccagctgtggttgatttagagtgttccccaccttctttgggaaggtccattctaagtacaactgctggtactctgttctagaatcactctgtggttgaggctgtaaaactggatcctggcccctactgcacttgcaagatctcttctgttttcgcctttatttcagaagagttcctgctatttcagtggcctgagaggtctacttattgttaatagtatattaatttctactatgctatctttagcttcccatggtataattttg

SEQ ID NO: 3143 - DNA, 661 bp, Homo sapiens
  misc_feature [331]..[331]: Chromosome 7, SNP identification no. = rs6964360
  misc_feature [331]..[331]: allele = c, in linkage disequilibrium with rs10486058, respectively
  misc_feature [331]..[331]: n is a, t, c or g
aggttagggccatgtggatggggtctggtgtgacttgttctgctaatagaatgtgagcagatacgatgcaagccacttacatgcctgttggtaaaggatctctatgtttatccccactctcctttttttctgtagtcacctcagaggccttatgcttaatttaacagcatcatatcatccaattcatgagaaattataatgtgagtgagaaatagacttttcttttttgttcgtgttgccactgagatttgtttttttaaacatatgacctaatgttaactaccttggccactagaagacaggccagctgtggttgatttagagtgttccncaccttctttgggaaggtccattctaagtacaactgctggtactctgttctagaatcactctgtggttgaggctgtaaaactggatcctggcccctactgcacttgcaagatctcttctgttttcgcctttatttcagaagagttcctgctatttcagtggcctgagaggtctacttattgttaatagtatattaatttctactatgctatctttagcttcccatggtataattttgccctgaatcatatctaaaatcacactttggtgatcatagcttcaaactctggaagtacagacctttatcttattaacttaccaacgtgagttt

SEQ ID NO: 3144 - DNA, 661 bp, Homo sapiens
  misc_feature [331]..[331]: Chromosome 7, SNP identification no. = rs7789750
  misc_feature [331]..[331]: allele = t, in linkage disequilibrium with rs10486058, respectively
  misc_feature [331]..[331]: n is a, t, c or g
gtgggtcatgcttctgctgaggtagaaaatcaaatacaaagaggaaagcaaattgtcatgtgagaatgtggttgagtcacattttgaagatgttgagtctgtgatgcctctggaacatccaagtagaaatacaagtaggttactggtctgtaacttacaaatgagatcccagctcttgataaagatttgagtgtgggtcagtggtttcccaaagcgccttccaaagttctgactgcataaactagggagcttgggggaataagttaagtggcctactataaacatgaagttttgctttagtttgttttactttattttttccatcttacangtgtatggacttgtgttagtttttgcataaaattatttttttcccaaatgttaggtaaatcttagattccagaagaaattaactttcccttctggcatattgttacctaccctaccctgatgcagggtagtgaaaagtattcgagggagtcagggctgtattcacttcctactttgagctgtgtgatcatgagaagattatcattagctccaataataaaaaatagcaacattatataatgtaaataaatcacctaccacactgactttttaatccctttcattttattatgtgggagtagtggtaaaagccctgagtaaaataagagtc

SEQ ID NO: 3145 - DNA, 661 bp, Homo sapiens
  misc_feature [331]..[331]: Chromosome 7, SNP identification no. = rs17167915
  misc_feature [331]..[331]: allele = t, in linkage disequilibrium with rs10486058, respectively
  misc_feature [331]..[331]: n is a, t, c or g
agtcatgccagttagaatataatccacatgaggccagtggactttggctgttttattcttggatgcttgtttagctcataggcattcaataaacatgccgtaaatttattgaaggattcaagagatacacacttttggtacatcagtgtttcagcacatttaatttcagtatttcagttgaaacaagtcatggcaattgtgattctgaatatgatccaattttgcaaataaattggagctggtaggacagtagtgagtcttaccattgtcaggtaaacacatagttcaactcctgactttagatctgatattttccaaggaaaaatgtttncaaataaaaggtgatgagaacttagatttcatgggttaaatgaaatttacagaggtatttttgtctatttgtcacagcattttaaaattaagagatgttgtgtaaaaatattaatttgtcactttccttgaataataggataaatggcagtggcagtcaaactttttcatatagcaacaatttgcttatcctgagtacctatggccagctataaacaaagtatgcgttctccaattgcaatacagtcctcactatcatccagtgcccgcttatgcagttttacccagtggatttcactccttatgttactcttttggcctcttgaggcat

SEQ ID NO: 3146 - DNA, 661 bp, Homo sapiens
  misc_feature [331]..[331]: Chromosome 7, SNP identification no. = rs2058076
  misc_feature [331]..[331]: allele = a, g
  misc_feature [331]..[331]: n is a, t, c or g
tatgattttaagaaatgaggtactgcagaattttcagtctcaggggtatcatattcatggggatttggtggttactgaacatttattagttactttatgtaaaggttaaaatgtacattttctccaactttttattttcaaaaaatttaaacctacagaaaataatggtacaatgaaacatttaatttcaaagaacacccatattcccttcacttaggttcatcagcttttaacattttgtgacaattgcttagatttttctaagtagatggatagctagacagacagacatatatggatctactatatctgaatagataggtagatgtcngatatgattatttgtttgttcatacacatacataaacttacctcttttatctatttcaagtaagtggtaaacatcactgcactttattcctaagtactaaagcgtgcctatcctgattaaagggtattctacataaccataaagaatattcttattgttgagtttttaaatacattccaatggttttattttatttttgtattcagaatatccataagttttatcagtgttgtctacaaacttaggaaatgagatttaagccagtactggtatacaaaattctaaaatactgttgtattacctaggcatcttgggaattttagaacctga

SEQ ID NO: 3147 - DNA, 661 bp, Homo sapiens
  misc_feature [331]..[331]: Chromosome 7, SNP identification no. = rs4722076
  misc_feature [331]..[331]: allele = a, in linkage disequilibrium with rs1015818, respectively
  misc_feature [331]..[331]: n is a, t, c or g
attctcctgcctcagcctcccgagtagctgggactacaggcacccgccaccacgcccagctaatttttttttgtatttttcgtacagacagggtttcaccgtgttagccaggatggtctcgatctcctgacctcgtgatccacccgcctcagcctcccaaagtgctaggattacaggcgtaagccaccgggcccagccaaggacaatttcttgaacccgggaggtggagattgcagtgagcaaaaatagggccactgcagtccagcctgggtgacagaaccagacttcgtctcaaaaaaaaaaaaaaaaaagagtggagtccttggaactntatggtttggtgaagctaactgaattttaaaacagagttcagaggtcagggtcttggaagcacttttctatttggaagaacttgctttctaagtcgaacatcaaaaattcagtactatttttgtaacttcctgtgagtctataattgcttcaaatcataaaaaataataatgttttaaaaaccggcatgtggttcagcatcttttccagggctctgcagttctggatgcctatgccgagatggaacttacatcagcttgggtctctgggcaaccgtgatgagcagaacctcattggccacccacaacatatatgtggcagacgtgagaaa

SEQ ID NO: 3148 - DNA, 661 bp, Homo sapiens
  misc_feature [331]..[331]: Chromosome 7, SNP identification no. = rs1859797
  misc_feature [331]..[331]: allele = a, in linkage disequilibrium with rs1015818, respectively
  misc_feature [331]..[331]: n is a, t, c or g
gttcaggctcaggtttgtcctaaggtaaggttgcagtcagctgaaggcactgctgcgggaagatctgcttctcagctcactcctgtggttgtcggcctcaatttcctcctggctgttggccaaatactttaattcctcaccgccaagcctcctcacaagctgcctggtgtgttcacaaggcggcagccggcttcccccaaagtgagtgagccaagagagggagagagacagagacagagataggaaagggagaagacacacaactgacagaagccagtttgtgcatttgttgctgttttcgttattgcttttgcttaacacaacaaagctnatttctcacgtctgccacatatatgttgtgggtggccaatgaggttctgctcatcacggttgcccagagacccaagctgatgtaagttccatctcggcataggcatccagaactgcagagccctggaaaagatgctgaaccacatgccggtttttaaaacattattattttttatgatttgaagcaattatagactcacaggaagttacaaaaatagtactgaatttttgatgttcgacttagaaagcaagttcttccaaatagaaaagtgcttccaagaccctgacctctgaactctgttttaaaattcagttagcttcaccaaaccat

SEQ ID NO: 3149 - DNA, 661 bp, Homo sapiens
  misc_feature [331]..[331]: Chromosome 7, SNP identification no. = rs17748936
  misc_feature [331]..[331]: allele = t, in linkage disequilibrium with rs1015818, respectively
  misc_feature [331]..[331]: n is a, t, c or g
ttcagagacctgcagagacatgtgaatgatttgcctgcagagaagccaccctctccagggcctcctctctggagtggccagagtgcagtggtgatcatagctcactgtagcctcaacctcctgggctcaagccaccctcccacctcagcttctcgagtagctgaggctcctcagccatcatacctggctaatattttaatatttgttgtagcgacgaggtcttgctctgttgcctgggctggtctcaaacacctggccttgagcaatcctcctacttcaaccacccaaagtgctgggattacaggcatgaaccactggacctggcctaaantgtaaaatttatatgtgagaagagacttcaggaattgaaaagaactataaaagaggagacttaccctaccaaagaccaaaacatattatgtagagtaattattgtagtattagtgttacaggatctctggggtgtcaatttttctgggtggaaactgtggccacagtgtctttgcctgagttcttgtcctgtgtccaggaagaaagaggtatgcagacaagcgaggggtaaagaagaagagcttcatttagtgttagaacagctcagaggggtggatagctcctctctgtaggcaggtcctccttcgagtgttcagctgtcagcagaaac

SEQ ID NO: 3150 - DNA, 661 bp, Homo sapiens
  misc_feature [331]..[331]: Chromosome 7, SNP identification no. = rs4722077
  misc_feature [331]..[331]: allele = a, in linkage disequilibrium with rs1015818, respectively
  misc_feature [331]..[331]: n is a, t, c or g
tttgttgtagcgacgaggtcttgctctgttgcctgggctggtctcaaacacctggccttgagcaatcctcctacttcaaccacccaaagtgctgggattacaggcatgaaccactggacctggcctaaattgtaaaatttatatgtgagaagagacttcaggaattgaaaagaactataaaagaggagacttaccctaccaaagaccaaaacatattatgtagagtaattattgtagtattagtgttacaggatctctggggtgtcaatttttctgggtggaaactgtggccacagtgtctttgcctgagttcttgtcctgtgtccaggangaaagaggtatgcagacaagcgaggggtaaagaagaagagcttcatttagtgttagaacagctcagaggggtggatagctcctctctgtaggcaggtcctccttcgagtgttcagctgtcagcagaaacaaggccctggagagggtggctcctctctgcaggcaggacatttgatttctctgcacctctctgctgcagctgctgctctcagtggagagggtattcctctctgtagctggtcatcccatcgtctccagctatcagctgagaggccactcctttctgcagccggtcgtctcttcatccctccaacctctgctctctttgtcc

SEQ ID NO: 3151 - DNA, 661 bp, Homo sapiens
  misc_feature [331]..[331]: Chromosome 7, SNP identification no. = rs1636305
  misc_feature [331]..[331]: allele = t, in linkage disequilibrium with rs1015818, respectively
  misc_feature [331]..[331]: n is a, t, c or g
aatgtttcttctactgtctgttatttccttttttggtgagcttatttttcctattggtttggtcaaatttgtttcatgttggagcattcccaaaaatatctggtgttccttgttgtattgtattgtttatattcaagaggagcccacatcatgctgattagaagctctggtggcatggagctgactttttggccagtgggcttcacttttggacaacagaagagagcactgaatatttcacttgaagacccacagatgtcagtgtgtgtgtgttttcctcccacgctgtccagcctgcaggttggattccagaccactgacatgctgcgtnaggagtaaaggaagaagtctcgggtccaatcacagtccctgcagactttgaatcaatttctctgttttcggagcctcacttctccctgccctaggccatacttagccatactaaccctcttctggtttttgaagtaaattgtatctcttctcttccatatccttctcaggattttggctgcaaattcttccactatgctaaatcagttaccagccatccatttgctgtgattcttccaaaagtgaattgaaatctctcatcctgatatattttcttctacattttttttgctcttatggatttatacttttgtttataacttcccaatca

SEQ ID NO: 3152 - DNA, 661 bp, Homo sapiens
  misc_feature [331]..[331]: Chromosome 7, SNP identification no. = rs7784865
  misc_feature [331]..[331]: allele = c, in linkage disequilibrium with rs1015818, respectively
  misc_feature [331]..[331]: n is a, t, c or g
tagaggattatctcagggaaaacaggggaggaaaattagagagagacctagtagatttggatccagtaaggacaaggtcaaaggaaagtcttgaacagcagctataaagcaggcagaggaggtaacagctcagattagagcagggtggaggactccaaagggaagagccctagaaaaaaggggaaattgaaaactgaatgatcaaatgaagcattagggaaactacaggatagcatattatacaaggaaagagatgagcaacttcaaacttcaagaaaaacacgaagctgtattacaaagaagctgtaattgtggtttaaatcttggttcngaaatgtatgatgtttgcagagttgtgaaataaatattgattatttacttgacgaaaagtaatgatgaaatacatagagttggtgaaagaagtaaatgtagatgattatatttgaatctgtcaaggaagaagtcattagataatgcctaaaattggataaatcaagaaatagtataagcacactattttggaatattaaaattactaatagaatcacagctttaaaaaaagaaaaatatggtctgggtgtggtggctcatgcctgtaaatcccagcactttgggaggctgaggtgggcggatcacgaggtcaggagatcaagaccattct

SEQ ID NO: 3153 - DNA, 661 bp, Homo sapiens
  misc_feature [331]..[331]: Chromosome 7, SNP identification no. = rs4719679
  misc_feature [331]..[331]: allele = c, in linkage disequilibrium with rs1015818, respectively
  misc_feature [331]..[331]: n is a, t, c or g
catgctaactcacctagcactgtgacacaaaggtttggggccagaggttttattgaaatataaatgggttctattctcctagcactggaagtatgtgagtaagaggagaaatgaggtttgaaatttgcagagccatagactagtttctttactatatgtggaagtgactgtgaaccacataaatgtatctcactaaacccaaacagaatatgtccccaatttaatatccccttggccagatcccagtaattccagcagctgctccaacaccaccgaacacaacggaaggaagaggcagcagtctcaacagactgtcattaatatatctcantttgtcagccaacagacatataaaaaaaagcttaatattattaatcatcagggaaatacaaatcagaaccacaatgataggccatctcaccgcagtcagaacggctattataaaaagtcaaaaaataacagatgttggcgaggctgtggagaaaaggaacacttaaacactgttggtgggaatataaattagctcagccactgtgcaaagcaatttggagatttctcaaagaactaaaatagaactaccatttgacccagtatatacccaaaggaaaataaatcattctaccaaaatgacacaggtactcatatgttcatcgcagcactg

SEQ ID NO: 3154 - DNA, 661 bp, Homo sapiens
  misc_feature [331]..[331]: Chromosome 7, SNP identification no. = rs11761561
  misc_feature [331]..[331]: allele = c, in linkage disequilibrium with rs1015818, respectively
  misc_feature [331]..[331]: n is a, t, c or g
ttgtaataaacctgcacaaaacaaaaatagaaattaatatacatcttgctttgtaaattttacaaaaactcatgacaatgtggtactctgttatggcctcataacagagcctcttccagggccttgggaagaaactatgcaagtaaaggccctgaagtttaagcttaattagcttcaagggaaatctacttctaggcatgagcttataattttttttaaactgcgtgcacatatcttgattaaaaacagagtggtgagaagagagcatattaaataaagggtaactggcaaaatatttggatcatatatgatagataaaagatgtacttcnagagtagattttttttttttcttttgagagagagtctcactctgtcacccaggctagagtgcagtggcgcaatctcagcttactgcaacctctgccttcattcaagtgattctcctgcctcagcctcccaagtagctgggattacagacatgcaccaccatgcccggctaatttttgtatttttagtagaggcggggttttgccgtgttggccaggctggtctcgaactcctgatctcaagtgatctgcacaactcagcctcccaaagtgctgggattacagggagagtagatttttaaaaactcatacacatggctgggcacggtggct

SEQ ID NO: 3155 - DNA, 661 bp, Homo sapiens
  misc_feature [331]..[331]: Chromosome 7, SNP identification no. = rs12532440
  misc_feature [331]..[331]: allele = g, in linkage disequilibrium with rs1015818, respectively
  misc_feature [331]..[331]: n is a, t, c or g
taaattttaaaattagctgattgtggtgatgtgtgcctatagttctggctacttgggaggctaaggtggaaggatcacctgagcccaggagtttgaagctgtattgtgctatgactgagcagctgcactccaggctgggtgacagagtgagaccctttctctaaatcaaacaaaaaataagctcccccttcaaaaaaaaaaaaaaattaaacagtaaaacctcaaaagaaatatgtgaaaaaagtaatgaaaataaaacaaactgctcccataaaaatgtgaccctagttttaaacatcttgaattcctaatagaataaatgtaggactcngcctggataaaagaggtaacgtttgcttggtgatagtgatatggtgaggtgttgtggcttccaaaggatggagaaagaggtggtgaatgggaccaccatattagaagccagatgtgcagtagcagaggtagatggctcatttgccctgattttgtttcttctggtctggattcaaagagaaatcctgcctttgttgttttcggtttcttcctttcttaaagcagcagcttgtatggctccaagcaaaactagattccatggaatggtaggctgctgggcttaacatcatagtcattattttcaatccactgcaagtgctgttcaacccca

SEQ ID NO: 3156 - DNA, 661 bp, Homo sapiens
  misc_feature [331]..[331]: Chromosome 7, SNP identification no. = rs2527698
  misc_feature [331]..[331]: allele = g, g, in linkage disequilibrium with rs1015818, rs1174995, respectively
  misc_feature [331]..[331]: n is a, t, c or g
tgaataatatttaacacagaatcccaaacatgagtaagcctactggttttaagaacccaagtaaaacacacacaaaaagatagcctttattatggaagcaaatcttgatataataaaagacgtctgaatgaaatggtagaagaatgaatgtcataccacagagcaacaggcctaaaggaatataccatgtgccttcagagacaaggctgcaaacttagcagaaaggagaacggaacacatcacagttttcctggctttaagtggggttgaacagcacttgcagtggattgaaaataatgactatgatgttaagcccagcagcctaccattncatggaatctagttttgcttggagccatacaagctgctgctttaagaaaggaagaaaccgaaaacaacaaaggcaggatttctctttgaatccagaccagaagaaacaaaatcagggcaaatgagccatctacctctgctactgcacatctggcttctaatatggtggtcccattcaccacctctttctccatcctttggaagccacaacacctcaccatatcactatcaccaagcaaacgttacctcttttatccaggccgagtcctacatttattctattaggaattcaagatgtttaaaactagggtcacatttttatgggagcagt

SEQ ID NO: 3157 - DNA, 661 bp, Homo sapiens
  misc_feature [331]..[331]: Chromosome 7, SNP identification no. = rs1175005
  misc_feature [331]..[331]: allele = c, c, in linkage disequilibrium with rs1174995, rs1174991, respectively
  misc_feature [331]..[331]: n is a, t, c or g
tgtaacacccatttatttattcattcatgtgtttgctcttgccatgtttagggaaggccatcaggctgggacagcgcgaaggagaaaggacagtactactttagactttctgggagtctgtgcaggggttcacctgcaaagaactgagcagacctgtattgggaaggaggccagggggttgaaaccagtgaaatggctgagacatgctttttaagatatgacttcatgccctgtgacccacaaatattcagtgagaccccaaaactcatgctatgcttagtgtgattgggtttcctgtagaatccagcaggggacgtccatgtcaccacanggccaaaccaaggtggcccatgaagacttaatttgtgaaatagagaagattaggaagaaataggtctgggtttgcaaaaattatgaggacgatggaaaaggtacagttcttctgttcccacacatgaatgtgatgtttggatctgctcatacacagtagataagcaggggaataaaccaaaaatatgcgggtattagtctgagtacccccaagaaggagacatcacaacaggattaaacatgcaagaaacttattaggtgaaacatctgtcacagaaaatggggagggagaggctgggagaatcatcagaccctgagtgaatccagagtg

SEQ ID NO: 3158 - DNA, 661 bp, Homo sapiens
  misc_feature [331]..[331]: Chromosome 7, SNP identification no. = rs12155362
  misc_feature [331]..[331]: allele = a, in linkage disequilibrium with rs1015818, respectively
  misc_feature [331]..[331]: n is a, t, c or g
aatttcataaagaatatatatcttaggccttggtttatttgaaagattatatgtattaatcaaagataaaagctgtaataatatcaattgtttaaaataaatatacaaagagtccaaattataagtttaaatttccatgaaatgaaaatgttgtgctctattacctgtcagaaatatatatttctttttatgctttcagaatttctggtgttggatgtatattaaatgataactttgtgataaaagctaaaaaaaagaaaagtgtataaataaaaccctccatgacttagcatataaaaaattactgggcatgtcaagaagcaagaaaacntgctctataatgaggaggaaaaacaaatcaatagaaactgacctagaaatgacactaatgataaaatctgtagacaagacaattcaacattatgttaagatagacaaaagcatgtgcatattacacagagacatgaaagatatttttttaaaagacccaattaaatttccaaagatgaaaaatacaatgtcagagatgaaaaccctgacactaattcaatccaacagcctgacttcttcatcctccacctgagctgctagggactgtgaaaaaactacatggggttggtaccagcatcaattcacatccattggcctaatgggtttcaca

SEQ ID NO: 3159 - DNA, 661 bp, Homo sapiens
  misc_feature [331]..[331]: Chromosome 7, SNP identification no. = rs1015818
  misc_feature [331]..[331]: allele = c, a
  misc_feature [331]..[331]: n is a, t, c or g
aaagaggtcacacctgtgaaaggacaggtaggagccgagttaggttattgagggagattgggcctaggatggggagacgcagagcagcaagctgcgttcagtcctctcctggggctgctgcaggacaagaaggcatttgtggggataggggagggatgaggctgcagagcgtgacagagaccagcacagggaggcctcacttgcaatttaacctggggagtttggaggaatttaaatagaggaatgcatgaccagatttgtgatttacagctctctgacagcagttcagaggtggatttggaatgtgggggcacagggcagaaaaccagtnacaggagcaattgtgaagtaggcccagcagggataaggtgtgaccgagacagtagcggcaatggagagagggtcagagcctgagacatttaagagagaaactttttgaaggatgtgagcggggagggcagaacagaggagattaggagcactctaattgtttttgcttgatcccttgggaagagaggaataaatttcaccaagacaaggtgagtaggaagaagagtaggtttgggaaaatcggataagtcttcttatgatgggtagaagcatctatgacgctttcaaagaggtatcctggaggtgcttggctgtgtcctgtatgatgaca

SEQ ID NO: 3160 - DNA, 661 bp, Homo sapiens
  misc_feature [331]..[331]: Chromosome 7, SNP identification no. = rs1174995
  misc_feature [331]..[331]: allele = t, c
  misc_feature [331]..[331]: n is a, t, c or g
tctgatgggaaaggcagacaactaagaaagttcttgcctcttagagtgagaattaccagggaggaaggtaagcaagagctgcttgctcaggaaagaggtcacacctgtgaaaggacaggtaggagccgagttaggttattgagggagattgggcctaggatggggagacgcagagcagcaagctgcgttcagtcctctcctggggctgctgcaggacaagaaggcatttgtggggataggggagggatgaggctgcagagcgtgacagagaccagcacagggaggcctcacttgcaatttaacctggggagtttggaggaatttaaatagnggaatgcatgaccagatttgtgatttacagctctctgacagcagttcagaggtggatttggaatgtgggggcacagggcagaaaaccagttacaggagcaattgtgaagtaggcccagcagggataaggtgtgaccgagacagtagcggcaatggagagagggtcagagcctgagacatttaagagagaaactttttgaaggatgtgagcggggagggcagaacagaggagattaggagcactctaattgtttttgcttgatcccttgggaagagaggaataaatttcaccaagacaaggtgagtaggaagaagagtaggtttgggaaaa

SEQ ID NO: 3161 - DNA, 661 bp, Homo sapiens
  misc_feature [331]..[331]: Chromosome 7, SNP identification no. = rs1174992
  misc_feature [331]..[331]: allele = c, c, in linkage disequilibrium with rs1174995, rs1174991, respectively
  misc_feature [331]..[331]: n is a, t, c or g
ggagcatatctcctctaaagctcatgctggtaactgcctcatcattattaaccacaggtgggagacccttccgttcagagtcttgtcttttagtaattcgagtctgacccatgacgtttactcatctgtgggtgagtgacactcctcggtgctcctaagactgtgatgccatgagccataataggtaacagtggcccaaaagtgcgtggagataaaccatgcatcaaggtaattttgatgatgtcgggatatagagattaatagatattaaaaaataggcaattctaaaatcaaagcaaatgatccttctttctatcccccggaatatctntgcctgagagcctgagcagaatttgggggaatcaaaaatgttctccccaggccaagctcgggacctgctgatgagcccttatattcaatgtaagctctcatttactttagctgcattttagatttgtctcccaagtgacataagggagagcttttataaacacaaaacacaaatttgatgtttgaattccagcagccggccctgctctcggactcccggatttccggactcccggactcccggttcccgtttcctaaggcctgggctctgctggtctccagcccttgaggtgccacttggaatcctttacttctttctctcctctcttca

SEQ ID NO: 3162 - DNA, 661 bp, Homo sapiens
  misc_feature [331]..[331]: Chromosome 7, SNP identification no. = rs1174991
  misc_feature [331]..[331]: allele = t, c
  misc_feature [331]..[331]: n is a, t, c or g
aataatgcctgaatcatttttttgcctcttgacaaatgctgatactagctaacttttgcatagcacttactatgagcctggtatgattctaagggctcgacatatgttagttcatttaatcctcacaacaattctgatactatttttaatcccaattaaaaatgaggaaacggaagcatggaacgtttaagtgactcccccaggttattcagctagtaagtagaggagcatatctcctctaaagctcatgctggtaactgcctcatcattattaaccacaggtgggagacccttccgttcagagtcttgtcttttagtaattcgagtctgncccatgacgtttactcatctgtgggtgagtgacactcctcggtgctcctaagactgtgatgccatgagccataataggtaacagtggcccaaaagtgcgtggagataaaccatgcatcaaggtaattttgatgatgtcgggatatagagattaatagatattaaaaaataggcaattctaaaatcaaagcaaatgatccttctttctatcccccggaatatctgtgcctgagagcctgagcagaatttgggggaatcaaaaatgttctccccaggccaagctcgggacctgctgatgagcccttatattcaatgtaagctctcatttact

SEQ ID NO: 3163 - DNA, 661 bp, Homo sapiens
  misc_feature [331]..[331]: Chromosome 7, SNP identification no. = rs2107973
  misc_feature [331]..[331]: allele = g, in linkage disequilibrium with rs1015818, respectively
  misc_feature [331]..[331]: n is a, t, c or g
atctttataatgttcagtcattctatccaagaatggaagattcctttccatttgttcaagtctacttttgtatctatcagaagtgttttaaaatttcgctgattaggtttgtacattgcttcttaagtttattcctaatattttatctttttgttagttctctaaatgggttttctttatcataatgtcctctaattggttattgcttatatataaagtctattgattttcatttgttaattttataatctaccactttattaaattattgttgttggtttgaatgttggttctatagggtttttctatttatgctatcatgtctgcaaanagataggttttttttacccattcttatgcctcgaattgatttattgtgtctaattgcattggctaatactctaatacaatttctagtaacagggattctaacaggcatccttgccttgttataatcttagtgaaaacaccttgaatgtatttccattaaataagatgtcagcgttaggattcagacacacacatatcacatataaagaaagtatttctcattttctgttctcctgagtatgttttgttttttaaatcatgaatggatgttgaattttgtcaaaggctttttcggcatatatggagataataatatgatttttccccatta

SEQ ID NO: 3164 - DNA, 661 bp, Homo sapiens
  misc_feature [331]..[331]: Chromosome 7, SNP identification no. = rs2107972
  misc_feature [331]..[331]: allele = c, in linkage disequilibrium with rs1015818, respectively
  misc_feature [331]..[331]: n is a, t, c or g
tacggattttatttcctttggatatgtacccggtaggattggtggatcataaaaactgttatctttataatgttcagtcattctatccaagaatggaagattcctttccatttgttcaagtctacttttgtatctatcagaagtgttttaaaatttcgctgattaggtttgtacattgcttcttaagtttattcctaatattttatctttttgttagttctctaaatgggttttctttatcataatgtcctctaattggttattgcttatatataaagtctattgattttcatttgttaattttataatctaccactttattaaattattnttgttggtttgaatgttggttctatagggtttttctatttatgctatcatgtctgcaaacagataggttttttttacccattcttatgcctcgaattgatttattgtgtctaattgcattggctaatactctaatacaatttctagtaacagggattctaacaggcatccttgccttgttataatcttagtgaaaacaccttgaatgtatttccattaaataagatgtcagcgttaggattcagacacacacatatcacatataaagaaagtatttctcattttctgttctcctgagtatgttttgttttttaaatcatgaatggatgtt

SEQ ID NO: 3165 - DNA, 661 bp, Homo sapiens
  misc_feature [331]..[331]: Chromosome 7, SNP identification no. = rs6461627
  misc_feature [331]..[331]: allele = a, in linkage disequilibrium with rs1015818, respectively
  misc_feature [331]..[331]: n is a, t, c or g
aatagaaaaaccctatagaaccaacattcaaaccaacaacaataatttaataaagtggtagattataaaattaacaaatgaaaatcaatagactttatatataagcaataaccaattagaggacattatgataaagaaaacccatttagagaactaacaaaaagataaaatattaggaataaacttaagaagcaatgtacaaacctaatcagcgaaattttaaaacacttctgatagatacaaaagtagacttgaacaaatggaaaggaatcttccattcttggatagaatgactgaacattataaagataacagtttttatgatccaccnatcctaccgggtacatatccaaaggaaataaaatccgtatgttgaagagatacctgcactcccatgttccttgcagcattatttataatagccaagatatggattcagcctaagtgttcatcagtgggtaagtgaatgaagaaaatgtggtatatatacacaattaaatactattcagtctttaaaaataatgaaatcctgacatttgcaacaacatggatgagtccggaagacattaagtgaaataagtcagccacagaaagataaataccatgtgttctcactcatatgtggtagctaaaacagtagatctcaaagaagcagagagca

SEQ ID NO: 3166 - DNA, 661 bp, Homo sapiens
  misc_feature [331]..[331]: Chromosome 7, SNP identification no. = rs6461628
  misc_feature [331]..[331]: allele = c, in linkage disequilibrium with rs1015818, respectively
  misc_feature [331]..[331]: n is a, t, c or g
cttctgatagatacaaaagtagacttgaacaaatggaaaggaatcttccattcttggatagaatgactgaacattataaagataacagtttttatgatccaccaatcctaccgggtacatatccaaaggaaataaaatccgtatgttgaagagatacctgcactcccatgttccttgcagcattatttataatagccaagatatggattcagcctaagtgttcatcagtgggtaagtgaatgaagaaaatgtggtatatatacacaattaaatactattcagtctttaaaaataatgaaatcctgacatttgcaacaacatggatgagtcnggaagacattaagtgaaataagtcagccacagaaagataaataccatgtgttctcactcatatgtggtagctaaaacagtagatctcaaagaagcagagagcagaatactggttaccagaggtggggaggaataggagggagagaagaaagcaaagaggttagttagaggatatgaaattagccaggcacggaggctcaagcctgtaatcccagcactttgggaggccgagttgggcggatcacctgagtttaggtgatcgagttcagctcgagaccagcctgaccaacatggcaaaaccccgtctctactaaaaatataaaagttagcc

SEQ ID NO: 3167 - DNA, 661 bp, Homo sapiens
  misc_feature [331]..[331]: Chromosome 7, SNP identification no. = rs2527700
  misc_feature [331]..[331]: allele = c, in linkage disequilibrium with rs1015818, respectively
  misc_feature [331]..[331]: n is a, t, c or g
tggagtgcagtggtgcgatctcggctcactgcaacatctgcctcccgggttcatgccattctcctgcctcagcctcctgagtagctgggactacaggtgcccaccaccaagccaggctaattttttatatttttagtagagacggggtttcactgtgttagccaggatggtctcgatctcctgtccttgtgatctgcctgcctcagcctcccaaagtgctgggattagttccagtgttctatagcactggagggtgactatagttaacaatgatttatcgtatattttcaaatagctaggagagagggttttgaatgtccccaacataaangataagtgtttgaggtgacagatatgctaattaccttgatttggccattacatattgtatacgtgtattaaaacattgctctgtaccccataaatatgtacaactatttggtaccttaaaaaaaattttaagtaaaaaacaaagtaacagggctttttgatgagtccacaaggcactccaagagagtagagtacaaggatgcacacattcatgaaaaagtgtatgcacgtaaggactctcccagatgacattttggggaattcctgttttgcctttgatctcatttgctttcccttgatctatattatccttcttttagtcttttttatt

SEQ ID NO: 3168 - DNA, 661 bp, Homo sapiens
  misc_feature [331]..[331]: Chromosome 7, SNP identification no. = rs2527701
  misc_feature [331]..[331]: allele = g, in linkage disequilibrium with rs1015818, respectively
  misc_feature [331]..[331]: n is a, t, c or g
ttgaggtgacagatatgctaattaccttgatttggccattacatattgtatacgtgtattaaaacattgctctgtaccccataaatatgtacaactatttggtaccttaaaaaaaattttaagtaaaaaacaaagtaacagggctttttgatgagtccacaaggcactccaagagagtagagtacaaggatgcacacattcatgaaaaagtgtatgcacgtaaggactctcccagatgacattttggggaattcctgttttgcctttgatctcatttgctttcccttgatctatattatccttcttttagtcttttttattttttattttnattaagccttgaaatggccaggatttacttacaggagagcataatttaacagtataaaacaaagtttattagacacacactctactgagattagactttatgtttaattcatctttgtttctccataatgtgctttgaatagtgtcttatagtaacttctcagtaaatgttgaagcaatgaatgaaagaatgcgtaatgtatgacttgaagctcctgatattttctagccagttaggtttttattatttatttatttatttatttatttattctttttttgagacagagtctcattctgtcacccaggctggagtgcagtggcacaattg

SEQ ID NO: 3169 - DNA, 661 bp, Homo sapiens
  misc_feature [331]..[331]: Chromosome 7, SNP identification no. = rs2699462
  misc_feature [331]..[331]: allele = g, in linkage disequilibrium with rs1015818, respectively
  misc_feature [331]..[331]: n is a, t, c or g
ccattacatattgtatacgtgtattaaaacattgctctgtaccccataaatatgtacaactatttggtaccttaaaaaaaattttaagtaaaaaacaaagtaacagggctttttgatgagtccacaaggcactccaagagagtagagtacaaggatgcacacattcatgaaaaagtgtatgcacgtaaggactctcccagatgacattttggggaattcctgttttgcctttgatctcatttgctttcccttgatctatattatccttcttttagtcttttttattttttattttgattaagccttgaaatggccaggatttacttacagnagagcataatttaacagtataaaacaaagtttattagacacacactctactgagattagactttatgtttaattcatctttgtttctccataatgtgctttgaatagtgtcttatagtaacttctcagtaaatgttgaagcaatgaatgaaagaatgcgtaatgtatgacttgaagctcctgatattttctagccagttaggtttttattatttatttatttatttatttatttattctttttttgagacagagtctcattctgtcacccaggctggagtgcagtggcacaattggctcactgcagcctccgtttcccaggttcaagcaa

SEQ ID NO: 3170 - DNA, 661 bp, Homo sapiens
  misc_feature [331]..[331]: Chromosome 7, SNP identification no. = rs954717
  misc_feature [331]..[331]: allele = t, in linkage disequilibrium with rs1015818, respectively
  misc_feature [331]..[331]: n is a, t, c or g
accccttaacctgcaagcaattaaaagtaggtataaacatgactgcagaattcccctgagctgctactttcagcacactgcctatgaaataggcttgttctgcaggagcagtcaaggagctgtaacactgcaactttgataaagctgtttcttctaccatcagcttgcccttgaattctttcctgggggaagtaaagaaccctcccagactaagccccaatttggggcttgcctgccctgcatcacttgattctaaaaaaccccaggatcccttccttttctttgagacatcctgcattaatgaaggttttttcccaatgctatactctanataagttaatctctttaattttgaggtacattttgtcttgcacagtttggttctgtgacttggataggtttggacttcaccttctgttctccatgaactccatctaagcaacaagccccgtggagccttttgtgattctatacctgaccggtgaccagagacccagtggtgaatccaactcttggtcttatactccagattcttgtccattggtagattggtagcatagtcaagacttgattaggattatttttgagtgcttgctttgtttcgtgtgcctgcttcttttggttttatggcttgaccatttggtgacctctgtaaatggat

SEQ ID NO: 3171 - DNA, 661 bp, Homo sapiens
  misc_feature [331]..[331]: Chromosome 7, SNP identification no. = rs1730906
  misc_feature [331]..[331]: allele = c, in linkage disequilibrium with rs1174995, respectively
  misc_feature [331]..[331]: n is a, t, c or g
atgtgtggctaatttttgtatttttagtagagacagggttttgccatgttggccaggctggtctcgaactcctgacctcaggtgatctgctcaccttggcctccaaagtactgggattacaggagtgagccactgtgcccagccgaactcagaaatgttttaacactccagagaatagaaacactcaagagaatagtaaaagagaaatgctttctttatatgtgtatacgtgtatgtatgcatatgcttgtgtgtgtgtgttgtctaaatcctaaatctggtatcttatttaatgggaaaacattaaaagtgttttcactaagattactancaaggcaagaatacccactctcttccctattactgaaaattatattagcgtattcaccagtgcaattagacaagataaattaattagacacatcaaatagaattgtctgtttgcagataatatgataatctaatgagaaaatcctacagaatcaacaaactaacaaaaaataataaggtggtaggatataaaattaacaaacaaaaatcaatagccttaatgtatacaaacaataaccaattagaggatattatgatagacaaaaatctatttagagaaccaacaaaaagataaagtacttaggaataaatttaacaatttgcaaaccta

SEQ ID NO: 3172 - DNA, 661 bp, Homo sapiens
  misc_feature [331]..[331]: Chromosome 7, SNP identification no. = rs2527705
  misc_feature [331]..[331]: allele = c, in linkage disequilibrium with rs1174995, respectively
  misc_feature [331]..[331]: n is a, t, c or g
tcaagtgatcctcctgcctcagcctcccaagtagctgggactctgtgtaacatttcgaggagctgtcagtctgtttactacagctgtacttaccttttgacccagtaatcctgcttttaaaaatctaccttgaagatacacgtctaacattttaaaaattatatgtatcagctatttgttacagtagtgtttataattgaaaaatttgggaaacaatgtaaatgtctgtctataggaatgtgggttgaacaaactatgataaagccacacaatgaaatactacacagctatcaaagataaagaggaagatctctgtgaacagatagagcantttccaggatatattgttacgtgtaaaaggcaaagtttataagcctttctattatatgctaccttttaggtaagaaaagagatataagaaaatataactgtatctgcttttttgtgcaaaagaaatataggaattataaaccataaattaaagacattggttatctacaaagaatggcagggaaccaggtagaaaggatgagagaatgggaacaggctagcaagaacgaggaggaagtaacctttctctgagcatagactttttataactttgattttagaatcatagcaaaatttcccataccttagaaaaacctaagtaaatttgaaa

SEQ ID NO: 3173 - DNA, 661 bp, Homo sapiens
  CREB5
  misc_feature [331]..[331]: Chromosome 7, SNP identification no. = rs6462088
  misc_feature [331]..[331]: allele = a, in linkage disequilibrium with rs6978323, respectively
  misc_feature [331]..[331]: n is a, t, c or g
ctttctaggaatttgtccttttcatcaggattatctgacttgttcacaatacagttgttcctgctgcatctacttttgtttcaagttatttttaaaaaaaaaaaaaagactgctaaactttttgaaaatactaccatgagggctcctgaatgacgcagttatgcagttctgggttctttgcagttcatgccttatgataatagctgttataaagtgtttaccgtatactggatattatgcaaaatacttaacatacgtagctgttagtgtcacaacaaccctttgagataagttctatgttattctggaaagagaggcacatatgattatntaattggtatgttatgggactggtaattgcactcagataacctggacacttagagtagaaactattagtaggggtactcccattctctccaaggcttagcttaggagaaaagaaaatttgagggtgcctctttatatagaacatcagaagtccagaggataggatgctaatgggagggatatcaggactcctgcagcttcaggtgagctctagggaccatgagactctagtaggtactgtagaggtagagagtgaggaagacattttgaattcccactaattattccctcgaggttgcctcaaacttaagtctaggcttgtgctaggagc

SEQ ID NO: 3174 - DNA, 661 bp, Homo sapiens
  CREB5
  misc_feature [331]..[331]: Chromosome 7, SNP identification no. = rs2391666
  misc_feature [331]..[331]: allele = g, in linkage disequilibrium with rs6978323, respectively
  misc_feature [331]..[331]: n is a, t, c or g
ctggagttaaaaaaaaaaaaaaaaaaaaaaaagctccaaaatgtttagcttagttggtacttcataaaaatcgggaatgataatgttctccaagataatgtcctatctctcatctgctgcaagggaattttcactgctgcaagggaaagcttcaatcagtcttgaaagaaaagtgttgggggtggtggaaagcctgtaggcgttgcagttggcagatgtgtgtttggttcctggctctctcctgctattgtttacctcaaattttctcctctgtaaattggggataataaaatactttttcagtagggttgtggtgaggactaagtcaacngcaataaatctgagttgccttctcttccttctttctgactaagcttttcgtgtcacaagaccaatattaccaatcaggaagcatttccaaacaagtactcctgcctcatcccaaatatgccctgaatggtctgacttttctcggttcaagtgagtccagattctgagagataccggaagggcgcttagacgacatctctccggtgtgttgactcctctgtggagcctgagtctctctgagccccaaggtcaaggctttgcaaatcggggctatgatccggaaaatgtagtgctcatatggttctgggcgtcagaacatgattacatattc

SEQ ID NO: 3175 - DNA, 661 bp, Homo sapiens
  CREB5
  misc_feature [331]..[331]: Chromosome 7, SNP identification no. = rs6978323
  misc_feature [331]..[331]: allele = c, t
  misc_feature [331]..[331]: n is a, t, c or g
ctgactaagcttttcgtgtcacaagaccaatattaccaatcaggaagcatttccaaacaagtactcctgcctcatcccaaatatgccctgaatggtctgacttttctcggttcaagtgagtccagattctgagagataccggaagggcgcttagacgacatctctccggtgtgttgactcctctgtggagcctgagtctctctgagccccaaggtcaaggctttgcaaatcggggctatgatccggaaaatgtagtgctcatatggttctgggcgtcagaacatgattacatattcctcagtcatagaccactgtgagttaaggtccccanagaaacagatggcacacttgaaggggtaatcaaagaaagtgcaatgtgcacaggctaactggggactagccacagccacagcagggggcttttccaacctctgagcctggagggacagggggccaagggaagaccccataggggagggccgtagctgtgggagaggggctgcctgtcaagtgtagagacacacagtcactactacccagtgcccagcaggcagtgtagggccttccaccctttagccctccaactgagggaatctggtggtggggaggggcaattggtagagggcagcctcctagggcagagggaagagaggagaagaga

SEQ ID NO: 3176 - DNA, 661 bp, Homo sapiens
  CREB5
  misc_feature [331]..[331]: Chromosome 7, SNP identification no. = rs1859020
  misc_feature [331]..[331]: allele = g, in linkage disequilibrium with rs6978323, respectively
  misc_feature [331]..[331]: n is a, t, c or g
agggaaagttcacggtcactgcagtctgctggctgcacctggatggcaagttctttgggatgttgtcacatagactaaagcatcagatgtgtggttgagtaagataaccttgactgtccaagtccatgaggacgagggcaagcttcgatgattggatctgggaccagagacatggaacgtggcatcttacctgctgtctgagacagagacagatctgctcgaccaaggatcatgggcaatgggttgagcaggcaccagagtgggggaaggaggtgctaagaataatagcatttctagttctcctttgttaaatcctgactcctacaggtcngttgaactccctcttctgcactctcatcgtctcccttgagactggatctcactttcacggagatgtgtagttatcagcttgtgtctgcctgccttgaaggccacatatcaagagctaacatttattgagagtcaaccgcgtgctaaatgctttatagctagcttctccttccatcttcacgacagacctatgaggtagttgtcattattcttcttcctattttgcagactagagaattgaaattcagagaaattcagtagcatgtccaagatcatgtaggtcttaatgtaaagagcagacagatgggatggagctcaaattcaaaatccc

SEQ ID NO: 3177 - DNA, 661 bp, Homo sapiens
  CREB5
  misc_feature [331]..[331]: Chromosome 7, SNP identification no. = rs217509
  misc_feature [331]..[331]: allele = g, in linkage disequilibrium with rs6978323, respectively
  misc_feature [331]..[331]: n is a, t, c or g
ttttcccttcccctttcttcagcctttcaataggcatgtctcataggccttctccaacgtccccactgggtgctgcctgcaccctcttccccttttttctttccctttcagaaggatccaggttctgggtttttcctagcatatgatctacactcccctgagcaaagaaaccacgttcatgcgtaggaagggctcctaggtttgggatcacaggggcatttaaagaaatcctctttcccttttcatactgatttgaagtgtggattcgaaaatggtgctgttgtttgggggcctgagccctggggcagaaaaagagaaggccctgcgtttntttattaatggcttggaccttttgatgaattggagtctggcacagtgttaacctctcgtgggtggtggggttcaaggaaaaggccttttccttccatgtgctttttccagagtgttttagtggatttgcaggctttagtgagtgattctttgtttagtaggaagttgagaaagatatgaaggacttttctagtccatggaaataatctaggaatcccccaaaacacagcttattagctgggcatggtggctcacacctataatcccagcactttgggaagatgaggcagcaggattgcttgagcccgggagtttgagaccagcctgggca

SEQ ID NO: 3178 - DNA, 661 bp, Homo sapiens
  misc_feature [331]..[331]: Chromosome 7, SNP identification no. = rs13227275
  misc_feature [331]..[331]: allele = t, in linkage disequilibrium with rs17150810, respectively
  misc_feature [331]..[331]: n is a, t, c or g
tcaaaagaaaatcattttgacccttgtgctgtttcttaagaacaaaagatggaattcccatataaaggaagtcttccctatactaaaaggaatggcaacatttttttttttaaaacctcagactggcaacgggtggcacatctcacacacctgtgtgagcacgcaatcatcatgaactacaaaaaggttgaggaatggcagcattctcatcttcaaggacaaataatatgctgtgcagaccttgttagaataactcttatcttttgggcctctgacataatccagtcacagtttcacagctaatttttatttgtccaatctggtaattganttaaactgctctacgcaaaatttggttctccaccttcatattattacctatttaaaaagtcttaaaggttagccttatctgattttttcagaaacatgatttggatccaactgtcttttataaacttgtgagtccatatatatatatatatatatataatttttatttttaatttttgtgggcacataatatgtgttaatatttatggggtacatgttttgatacaggcatgcaaaacttaataattaaatcatggagaatggggtatccatacccataagcatttatcttttgtgttacaaactcttttaaagtgcacaaataagttgt

SEQ ID NO: 3179 - DNA, 661 bp, Homo sapiens
  misc_feature [331]..[331]: Chromosome 7, SNP identification no. = rs12701273
  misc_feature [331]..[331]: allele = t, in linkage disequilibrium with rs17150810, respectively
  misc_feature [331]..[331]: n is a, t, c or g
ctaaaagtggggtgttgatgtctccagctgttatttttggggaatctacctctctttttagctctaatatttgctttatatatctgggtgctccagtgtggggcatatatatatttacaaattattatatcctcttgtcaaatttacccctgtatcattatatgatgaacttctttttcttttttaatagtttttgttttgaaatctattttgtctgatatataaatctattttgtctaatgtaatagacaaaatagtatagctactcttgtttttttttggtttccattggcgtggaatatctttttccctatcttaattttcagtcttngtgtgtctttacaggtgaagactatttcctgtaggcaacagatcaatgtatcttgattttttaatccattcagccactctatatcttttgattggagagtttagtacatttacattcaatgttacttttttctacttctttcccaatatttgtacaatgttatgattgataagtgataagttactgctgccattttgtcatttgttttctggttgttttatgatcttttcttccatctttctctctttcttgtattacttttagtaggtatctttgatctttgggagttcgaatattaaatgccttgaagtagtcttctttgggttaaat

SEQ ID NO: 3180 - DNA, 661 bp, Homo sapiens
  misc_feature [331]..[331]: Chromosome 7, SNP identification no. = rs4720103
  misc_feature [331]..[331]: allele = g, in linkage disequilibrium with rs17150810, respectively
  misc_feature [331]..[331]: n is a, t, c or g
ttcgtatctcagtggttcaaatttgccatgtcttgctatttgatttccaggtcatatatcattgcattcaggttttctcctctttagaaagcctgggatggtaactctctccttcaattttttcatcagttgctatacaattttttttttttggttctaattgctggtatggcctgacactaaaggtttatcctgaaggcctagaaatcaatgctctttttcaatataacttgattctgtactcttggcttttcttgatacatgtgaattgttataatcatgacctgggacacatcttcctgtatctgattaaattcaagtacccttttcntcagattcgacctccaggttatctaaatgagctccccaaaaggagaaacaatcacattgcagaaagtttttctttacttttttggtacctggcctaaggaagattatacattttatcaacataatttcctgtgttgcttttattagatttgatttttttttaacctgaagtttaaaatggttaagatagttttaatgtaattatttgtatggctttttaagccttttgattatcactctggttatataaatgacttatttcacaagtaacttgtgattctgtattgatacagtgttttgagccctttaaaaacttcctcaaaatcaaatt

SEQ ID NO: 3181 - DNA, 661 bp, Homo sapiens
  B1
  misc_feature [331]..[331]: Chromosome 7, SNP identification no. = rs13443222
  misc_feature [331]..[331]: allele = a, in linkage disequilibrium with rs17150810, respectively
  misc_feature [331]..[331]: n is a, t, c or g
tgatcctcccgccttggcctcccaaattgctgggattaccggcatgaaccattgtgcctggccctaaaatatactcttagatttgggtttctaacaacttgaagatcaatggacaatataacaatttccagaactgtaataaaaaagtgggttcatgaaactattaatcaagatcaggcagaacaagaattaattacgtgagtttaactaatgaagacaatgtttttatgatattatttcaaatgttgttggttctttactcaaatagttttttccagatttaagaaaatcttgtcttttaagctatttataatttacagcaatttgatanagtatacttgtgtaaaaaaagataaaaactttttttctctttacttgattcctccataattagaaaaccatttgtgagtcttcttatggtaatatggtcatttcaataagtctaataaaaatctgctctctctgtatagcagaatacaattggaaactggttatattaccaaggctttgactgaaaggtcatttttaaaaatattgaggccggacgcggtggctcacgccagcaatcccagcactttgggggactgaggtgggtggatcgtttgaacccaggagttcgagagcaacctggacatggcgaaactccatctctacaaaaaat

SEQ ID NO: 3182 - DNA, 661 bp, Homo sapiens
  B1
  misc_feature [331]..[331]: Chromosome 7, SNP identification no. = rs1468797
  misc_feature [331]..[331]: allele = c, in linkage disequilibrium with rs17150810, respectively
  misc_feature [331]..[331]: n is a, t, c or g
gtattagtacatgcatcctacttcagtcgtaggctgggaactgctttgcccatttactcacagacctgttgaagtgtctcaggaggatgctcatgctccaagtgacattcctcaatggaatccttaaaaattctcatcccttttttctcaaaagtactcacagaatctcatacactttgtgctcctagtgtttgtttatttcagtgcaaacatctaagaaatcaatcaccttacagactccaaaccattatactgcattagagaatcttgttcacaaaataaaacatggaaagggtattcatgtacccgaagtttaacaacagacataccntcttacctgatgccacgtcagatgagctctgccccacctttctgcgaaccctcgttcggcaaattttgctttatgaacgcctgacaaggtcccagtgatggagcagagggagcaagaacggacggtgcagagaaaagcaacctttagcttcactattccctctcgtcctccagctgaaagttgttccacgtcccgggcaaagagagagccccaccaggcagcaccaccagctccacagagttggagtgattcccccaagaagctcccctgcgccccccgtcacccccagagaccagcagaggaaacggcatctatcccttggaagacact

SEQ ID NO: 3183 - DNA, 661 bp, Homo sapiens
  B1
  misc_feature [331]..[331]: Chromosome 7, SNP identification no. = rs1569239
  misc_feature [331]..[331]: allele = a, in linkage disequilibrium with rs17150810, respectively
  misc_feature [331]..[331]: n is a, t, c or g
ttagatgtttgcactgaaataaacaaacactaggagcacaaagtgtatgagattctgtgagtacttttgagaaaaaagggatgagaatttttaaggattccattgaggaatgtcacttggagcatgagcatcctcctgagacacttcaacaggtctgtgagtaaatgggcaaagcagttcccagcctacgactgaagtaggatgcatgtactaatacccccaatccttctagtaataggattattgtttctcctcttgttacttggagaccacaacagtttagatgagctgcgctgattttatcagcacctcctgccagtcaaatcctgcntttgacttcaatttcctggagaaatgtatttttttgggtatctcacttttactttaaaaatgaaaccgtatcttacaggtatacacatcttacatgtcctcattgataaacaacttgaaagatgctgcaggataagctatgggtcttaagttggccagcattcagagaaagattttctaacttattagcattttataaagaaaacaattactgagatttttttcatgaatatacggaagaattaaaaaaaaaactagaaaacccagaagtttttaaagaagaattttaaaaaactttattttgaaaataagttacaagttatttgtcaga

SEQ ID NO: 3184 - DNA, 661 bp, Homo sapiens
  B1
  misc_feature [331]..[331]: Chromosome 7, SNP identification no. = rs1548879
  misc_feature [331]..[331]: allele = c, in linkage disequilibrium with rs17150810, respectively
  misc_feature [331]..[331]: n is a, t, c or g
agtgtcacaccaaatttaagaaagtagaaatcaggtcttccagtcaaagaaagatgacaaatgcatgtagtgttcaaaagaagtatactgcttttgaaggcaataatacaagggctcactgttggaattttcaacaaaagactcaaagggcaaaataacacaaaatttggagtaggacagctctgggtgcactttctgaccacgttacactacatgatcttaaacaagtcccttatcctctagtatctcaattgttctagggtggaggaggataaaatggctcaacccatagcaagtactcaatagatgtcagtaataacccaacagtagnaacagtgctagtaggagagacagtggtagtagtggtagttgaaagagacggtggtagtgtgttctgtgcaagacacaattacgaatgccaaactcaccctctggaccgaaattttaaatgggactcacaaagactgatagtaatcactaatggaaatgttattaaccagcagggatgttttataataatttcatgtattttaataattttcaaaaatatttcaaagtattctaaagcgtaagacttactacatccctcaaaaggtgtaaaagttttaaaattactatatatactattgctgttggattttttcccttcagtgagcatttc

SEQ ID NO: 3185 - DNA, 661 bp, Homo sapiens
  B1
  misc_feature [331]..[331]: Chromosome 7, SNP identification no. = rs10272253
  misc_feature [331]..[331]: allele = g, in linkage disequilibrium with rs17150810, respectively
  misc_feature [331]..[331]: n is a, t, c or g
aaataaaaattattaaaactttttaaaatattaaaaaaagaacaatagcaaattaaattcagaaggtcagcaaaaaaaggtcagccacctcttaaatgaaacctaaatctgagtaaacttgttgtagaaaaaaaagtattcaaaacaaaaaagtgtcaagtgaagagtatagaagagaatttctggagtttaggggataaggagattatctcccatttattattctaataaggcattagaaactaatctgttatgcctgtttataggactgcacctgttacaaccttcaaattattgtcttctaatcatcctttaacaatttaatcaaatntatgacatacttgcctgtagtttgaacttgtagtgtttagaattagtgtgaatagagctattgcttttatagtctacatggaggggcgtgtgcataggccgtttgtttagggttctggagtagacagtctgggtttaggtaccgcacatcacttaactagtgagaccactggcacggatttcttaacttctctgtattcaaggatacctgaataatagtatctacaatttactttgtagttttgttatgaatatcaaaatagaatgcttgcaaagcatttagaatcctgactggctttagtaaatgattagtagatactttcctttaagg

SEQ ID NO: 3186 - DNA, 661 bp, Homo sapiens
  B1
  misc_feature [331]..[331]: Chromosome 7, SNP identification no. = rs12673026
  misc_feature [331]..[331]: allele = g, in linkage disequilibrium with rs17150810, respectively
  misc_feature [331]..[331]: n is a, t, c or g
atgcctgtttataggactgcacctgttacaaccttcaaattattgtcttctaatcatcctttaacaatttaatcaaatttatgacatacttgcctgtagtttgaacttgtagtgtttagaattagtgtgaatagagctattgcttttatagtctacatggaggggcgtgtgcataggccgtttgtttagggttctggagtagacagtctgggtttaggtaccgcacatcacttaactagtgagaccactggcacggatttcttaacttctctgtattcaaggatacctgaataatagtatctacaatttactttgtagttttgttatgaanatcaaaatagaatgcttgcaaagcatttagaatcctgactggctttagtaaatgattagtagatactttcctttaaggcgaagtcattaaaaacctggtttttattttccaattacttaaagacaaatcagtgagcaactggaaatcaacactgaatgaaaaggggataaaatgcaaacctcggttccttattcaagacagttaactaaactgaattaaaaaaacattgtatacatattttattttttgttatttaaaacactttttgtttattttgtaacccaaaagccaggtttcatgaccaaaaaatgttttattactattgttcct

SEQ ID NO: 3187 - DNA, 661 bp, Homo sapiens
  B1
  misc_feature [331]..[331]: Chromosome 7, SNP identification no. = rs10227739
  misc_feature [331]..[331]: allele = g, in linkage disequilibrium with rs17150810, respectively
  misc_feature [331]..[331]: n is a, t, c or g
cgtttgtttagggttctggagtagacagtctgggtttaggtaccgcacatcacttaactagtgagaccactggcacggatttcttaacttctctgtattcaaggatacctgaataatagtatctacaatttactttgtagttttgttatgaatatcaaaatagaatgcttgcaaagcatttagaatcctgactggctttagtaaatgattagtagatactttcctttaaggcgaagtcattaaaaacctggtttttattttccaattacttaaagacaaatcagtgagcaactggaaatcaacactgaatgaaaaggggataaaatgcaancctcggttccttattcaagacagttaactaaactgaattaaaaaaacattgtatacatattttattttttgttatttaaaacactttttgtttattttgtaacccaaaagccaggtttcatgaccaaaaaatgttttattactattgttccttaccatctttcctaacctgtcagtaccagacctcccacacctacctgcttatcttaatatctcaatgtcaaggcctatatctttcctagattggaatacagattagcattttatttgtgtctcaatttatggctaatttttcattttcttgatgacttgggatgtcttccaggagaaa

SEQ ID NO: 3188 - DNA, 661 bp, Homo sapiens
  B1
  misc_feature [331]..[331]: Chromosome 7, SNP identification no. = rs12671396
  misc_feature [331]..[331]: allele = t, in linkage disequilibrium with rs17150810, respectively
  misc_feature [331]..[331]: n is a, t, c or g
ttttattttttctgccatgcttggcaaagatgaggtctcactatgttgcgcaggctggtcctgaactccttagctcaagtgatcaatccgccttggcctcccaaagtgctgggattacaggtgtgtgccaccacacctggcctaatggtaaatgtggccaaaatacaggagtgttctgctttaaaaaaaaatgaaagtttatggggaatttgaagcataaccaaaagcatgaagaataacaaaatgaacccccatgtatccatcatcatttgttatctttaaaaaaaaacagctttgttgaaatacaattcaaataccatacaattcaccnatttaacacataaaattcagttccttttttgtatattcacagatacatgtaaccattaccacagccaagtttggaatatttttatcaactcaaaaagaaacctcgcatcccttagctataactctccttctctcttccttctcccctacccccagacctaagcaactaagaatctactttctgtctttatgaatttgcctatcctggatattttatataaacagaatcatataataggtggccttttgttactggcttctttaacttagcatgtttttaagagccagatatgtctgattctaaaacctatatgcttttatttatttatgt

SEQ ID NO: 3189 - DNA, 661 bp, Homo sapiens
  B1
  misc_feature [331]..[331]: Chromosome 7, SNP identification no. = rs12701274
  misc_feature [331]..[331]: allele = a, in linkage disequilibrium with rs17150810, respectively
  misc_feature [331]..[331]: n is a, t, c or g
tttgttttttgagatggggtctttctctgttgcccaggctggagtgtagtggtgtgatcacagctcactgtaatcttgaactcctgagctgaagtgatcctcttgcctcagcctcctgtgtagctagtattacaggtgcgcaccagcatacctggctaacttatgtattttactcttttgggtgctattgtaaatgtaattatttttaaaatttcattttggattgttcattgcaagaatatagaaatatcatggatatttgtatatttattttatatcctgcaaccttgcttaactcatttattagttctaatagttttttcccaaattncttaggattttctatatacaagattatgtcatctgtgagtaaagatagttttacttctttttttccaatttggaagccttttatttccttttcttacctaattgctatagttgagagcatccagtatgattttgaatagaagtggtgaatgcagacatccttgtcttgtgcctgatcttaggaggaaagtgttcggtttacactattaagtatgatgtaagctgtggattttgcatagatgtcttttatcagtgtgaggaaccttctattcctagtgttttgagtgtttttttataatggaagagttggatttatggaggtgatcaagtg

SEQ ID NO: 3190 - DNA, 661 bp, Homo sapiens
  B1
  misc_feature [331]..[331]: Chromosome 7, SNP identification no. = rs7804742
  misc_feature [331]..[331]: allele = g, in linkage disequilibrium with rs17150810, respectively
  misc_feature [331]..[331]: n is a, t, c or g
acctttgaaactggagagacgcacttgggaaacaaatgatgactattgattatcagcccaaattgttgtttttttctattgttcattaattctttaaagatgtaagtccttattgttcaataaattatcgtctacaatggtgcatgataacacttcggacattgggggaacaaacatacaagatgtttatgtaatggaatttatgaaattctgctatgcatgaccttatgtttgccctggcatgaaagtcattgttgttgctctgaaatattgttgttctgaaataattaaggtagccatggtcttgtgaggaagagccatttgttggacntaggtttaaaaattagcccttcctccacagtctttaaagattaaaataaagcaaacaaacaacacaaaaatcattctatccacatgctttttcagttttttgatattaaattgcagattattggcagcctaatgaggcaggggactagagacgagggagagagtatgcagaagcaaggtcctgcaattagctgtgtgaggtatgggaatcatgtaacttatctgggcctctcctataaaatgagaggaccagctgattgatggatactttccagctgttttaggtctttgatttgaaaaatgattttttttaagccctcaaaaggtaacg

SEQ ID NO: 3191 - DNA, 661 bp, Homo sapiens
  B1
  misc_feature [331]..[331]: Chromosome 7, SNP identification no. = rs6973757
  misc_feature [331]..[331]: allele = c, in linkage disequilibrium with rs17150810, respectively
  misc_feature [331]..[331]: n is a, t, c or g
tgattgatggatactttccagctgttttaggtctttgatttgaaaaatgattttttttaagccctcaaaaggtaacggacggcagaggtcctctgaaaaagaaggggaaaactggagctctgctgtaagaaaatatccacttaggcaatcaggtatcagttacatcagtgcctcttcaaccttaaggtgcatgtgattcacctggagatactgtttggggaggatgagattcaacatttctcataagcttttgagtgatacagatgctgctgatccagggattacacctggagtagcaagggaccaaactctgtgaaaagggggatttcangagctaacgaagtggtgggtgaataaggaaaaattgatagagcaggagaaacaataatgatatatatatttttaagagacagggtctggctttgttgtccaggctggagtgcaggggtgcaatcatggctcactgtagcctcaactcctgggctctagtggagactggctaatattttttttttggtgggggggaaagatggggtcttgctatgttgcccaggctcgtctcaaactcctggcctgaactgattctcctgccttggcctctcaaagtgctggcattacagacatgaaccactgtgccttgccaagaaggatgtaaatgatg

SEQ ID NO: 3192 - DNA, 661 bp, Homo sapiens
  B1
  misc_feature [331]..[331]: Chromosome 7, SNP identification no. = rs10951376
  misc_feature [331]..[331]: allele = c, in linkage disequilibrium with rs17150810, respectively
  misc_feature [331]..[331]: n is a, t, c or g
aggtgtgagccaccgcgcctggcctaaattctcaagttatattggtatggtgtagatgtaccatagtgtgtttaaccagaacactgagtttttttctttaatgtaagtttaaaacatcataaaaggggatcaaaaccagagcaatggctaacacttattgagtgcttattatgtgccaggtattgtactaagtggtctactgtattcctttttgtaaaaaactaaaactgtatattttttatttttaattgtggtaaaataatgtgacataaaattgaacatctaaccatttttaactatatagttcagtaatggtaagtaaattgacatnattgtgcaaccaatctccagaacttctcatcttgcgaagtcaacactatatacctattaacagttctcctttctccctagcccctgacaatcaccattcttaatgtttctgtgactattctaggtacctcacataagtggaatcatatggtatttgtctttttgtgactggcttattttacttaacatgatgtcctcaaggttcatctacatagcagatgtcagtttccttcctttttaaggctgcataatattccattgtatgggtataccacattttctttatccatttatccattgatggatgtttaggttggttctgcctcttggt

SEQ ID NO: 3193 - DNA, 661 bp, Homo sapiens
  B1
  misc_feature [331]..[331]: Chromosome 7, SNP identification no. = rs10951377
  misc_feature [331]..[331]: allele = c, in linkage disequilibrium with rs17150810, respectively
  misc_feature [331]..[331]: n is a, t, c or g
atagtgtgtttaaccagaacactgagtttttttctttaatgtaagtttaaaacatcataaaaggggatcaaaaccagagcaatggctaacacttattgagtgcttattatgtgccaggtattgtactaagtggtctactgtattcctttttgtaaaaaactaaaactgtatattttttatttttaattgtggtaaaataatgtgacataaaattgaacatctaaccatttttaactatatagttcagtaatggtaagtaaattgacattattgtgcaaccaatctccagaacttctcatcttgcgaagtcaacactatatacctattaacngttctcctttctccctagcccctgacaatcaccattcttaatgtttctgtgactattctaggtacctcacataagtggaatcatatggtatttgtctttttgtgactggcttattttacttaacatgatgtcctcaaggttcatctacatagcagatgtcagtttccttcctttttaaggctgcataatattccattgtatgggtataccacattttctttatccatttatccattgatggatgtttaggttggttctgcctcttggttattgtgaattatgatacagtaaatccgtgtgtaaaaatatctctctgagattgtctttaat

SEQ ID NO: 3194 - DNA, 661 bp, Homo sapiens
  B1
  misc_feature [331]..[331]: Chromosome 7, SNP identification no. = rs11760829
  misc_feature [331]..[331]: allele = a, in linkage disequilibrium with rs17150810, respectively
  misc_feature [331]..[331]: n is a, t, c or g
gaaagtacagagatgttcagtaacttttagtaaccttccactggttgcatggttaacatgtggtggcacaggaattcaaactcacacaggttgcctctagaggctatactttcccaccacattatttacagccaatttcttggccaactttgtataaaaacaaatgaccttggtttctatgattagctcatgtggaatgcttactttaagaggcaggttggtctacattttaaaaaagtagagctgatcctcattattggcagactctgtatcatttgtgaatttgcctacttgctaaaatttatttgtaacccccaaatcagtgcttgcnatgcttttgtggtcatttgtgatcaagtgcaaaggagtaaaaattgagtcacctgatgcacatgttcccagctgatgttaaacaatggctttcttgtttcagttctcataccgtaaacaagtgtcctttcatggtctacagtatttagtgtcatgttttctcccacattttcgtaggttgtttttggagggggatgtggtgttttcactgtttaaaatggtctgcaaatgtaatactgaagtgctgtctaatgttcctaaaagcaagaaggctgtgatgtatcttgtggagaacagacagatggtccctgacttaccatggtttgactta

SEQ ID NO: 3195 - DNA, 661 bp, Homo sapiens
  B1
  misc_feature [331]..[331]: Chromosome 7, SNP identification no. = rs4720104
  misc_feature [331]..[331]: allele = a, in linkage disequilibrium with rs17150810, respectively
  misc_feature [331]..[331]: n is a, t, c or g
agggggatgtggtgttttcactgtttaaaatggtctgcaaatgtaatactgaagtgctgtctaatgttcctaaaagcaagaaggctgtgatgtatcttgtggagaacagacagatggtccctgacttaccatggtttgacttatgatttttcaactttaggatgttgtgagagtgatacacattcaatagaaaccatacttcaaattttgaattttgattttttccctggtatattaaatgtgtttttgacttaaaatattttcaatttatgatggatctattgagatgtaatcccatcataaattgaaaagcatctgtacatgaaattanataaggttagttcagcctgagttctagtgctggtgggcatgattcccatagtaatgaatcagcaatacatattaaataaggtatctttaaatagaaacacacaaaaaactacattatgtattgattggttgaagaaaatgttgttactagaagcttgcaggaatctgtctaaccctgtgtttctcctaggagcaatggttcagtatttgctaattcattgtttatggcggccttatacagaataactttcgtgaataaggagaattgactgcacttcgtagctaccatttaaatcggtgtaacatgaaggaaaacctcatttatgttaaa

SEQ ID NO: 3196 - DNA, 661 bp, Homo sapiens
  B1
  misc_feature [331]..[331]: Chromosome 7, SNP identification no. = rs4723255
  misc_feature [331]..[331]: allele = c, in linkage disequilibrium with rs17150810, respectively
  misc_feature [331]..[331]: n is a, t, c or g
cctggtatattaaatgtgtttttgacttaaaatattttcaatttatgatggatctattgagatgtaatcccatcataaattgaaaagcatctgtacatgaaattagataaggttagttcagcctgagttctagtgctggtgggcatgattcccatagtaatgaatcagcaatacatattaaataaggtatctttaaatagaaacacacaaaaaactacattatgtattgattggttgaagaaaatgttgttactagaagcttgcaggaatctgtctaaccctgtgtttctcctaggagcaatggttcagtatttgctaattcattgtttanggcggccttatacagaataactttcgtgaataaggagaattgactgcacttcgtagctaccatttaaatcggtgtaacatgaaggaaaacctcatttatgttaaataaatgaactgttgtagagtcccagggcatgtgatgctgtgttgtaattcaaaaggtccaagtgctttcacatctgccatatcagcaactcagtggtaggtagggctggtatatgctcattctagataagaaatcaaagtaaggagaggttgtttgggttgcccaaggacacacggatagttagtggtataaatggtcctgcagcccaattttcctgcttctttt

SEQ ID NO: 3197 - DNA, 661 bp, Homo sapiens
  B1
  misc_feature [331]..[331]: Chromosome 7, SNP identification no. = rs4720105
  misc_feature [331]..[331]: allele = c, in linkage disequilibrium with rs17150810, respectively
  misc_feature [331]..[331]: n is a, t, c or g
gattggttgaagaaaatgttgttactagaagcttgcaggaatctgtctaaccctgtgtttctcctaggagcaatggttcagtatttgctaattcattgtttatggcggccttatacagaataactttcgtgaataaggagaattgactgcacttcgtagctaccatttaaatcggtgtaacatgaaggaaaacctcatttatgttaaataaatgaactgttgtagagtcccagggcatgtgatgctgtgttgtaattcaaaaggtccaagtgctttcacatctgccatatcagcaactcagtggtaggtagggctggtatatgctcattcnagataagaaatcaaagtaaggagaggttgtttgggttgcccaaggacacacggatagttagtggtataaatggtcctgcagcccaattttcctgcttcttttttggtgtgaatttccctcttctatcttgcctttctataactaacatagcaagaggaagtgaatgctttttgagtacctatagcataccagttccagggctagtcactaatgcatttgatctcatttgtctcagcaactctttgtaataggagatggagttggccctccgtgtccccgggtttcacatccatggattcaaccaactgcagattgaaacctgtggatatg

SEQ ID NO: 3198 - DNA, 661 bp, Homo sapiens
  B1
  misc_feature [331]..[331]: Chromosome 7, SNP identification no. = rs4723256
  misc_feature [331]..[331]: allele = g, in linkage disequilibrium with rs17150810, respectively
  misc_feature [331]..[331]: n is a, t, c or g
ctagaagcttgcaggaatctgtctaaccctgtgtttctcctaggagcaatggttcagtatttgctaattcattgtttatggcggccttatacagaataactttcgtgaataaggagaattgactgcacttcgtagctaccatttaaatcggtgtaacatgaaggaaaacctcatttatgttaaataaatgaactgttgtagagtcccagggcatgtgatgctgtgttgtaattcaaaaggtccaagtgctttcacatctgccatatcagcaactcagtggtaggtagggctggtatatgctcattctagataagaaatcaaagtaaggagnggttgtttgggttgcccaaggacacacggatagttagtggtataaatggtcctgcagcccaattttcctgcttcttttttggtgtgaatttccctcttctatcttgcctttctataactaacatagcaagaggaagtgaatgctttttgagtacctatagcataccagttccagggctagtcactaatgcatttgatctcatttgtctcagcaactctttgtaataggagatggagttggccctccgtgtccccgggtttcacatccatggattcaaccaactgcagattgaaacctgtggatatggaagactgactgtactaggtatac

SEQ ID NO: 3199 - DNA, 661 bp, Homo sapiens
  B1
  misc_feature [331]..[331]: Chromosome 7, SNP identification no. = rs13244450
  misc_feature [331]..[331]: allele = c, in linkage disequilibrium with rs17150810, respectively
  misc_feature [331]..[331]: n is a, t, c or g
tccgtgtccccgggtttcacatccatggattcaaccaactgcagattgaaacctgtggatatggaagactgactgtactaggtatactaggtcattatatataataagggacttgagcatctggggatttttcatctgtggggtcttggaaccaatcttccacaggtacaaagggccaactctagtgcagtctcgccaatgactagactgaaaggaagttaggtatttcactgaagacttacatgttaaatagtgctgatggaatttgaatcttgatcctccaaagaatctgttcttttgttattttctgcagttctctcctaaatgtttnagaagagagaattagcacaacataaatgtataatttctcagcccaatttactaacggtgttgcaaaatatctgattaatgcttccagccatttggatttgtggtttcaaatatgtgtacaaaatattaaaaagttaatatagaaatgtccttctcagatctgtccaagtttaatttgctatgccttaagacataattattagttcatagtgtgaagtagattattataaatgttttctttttagtgtgaaagaaaatgtctttatttaaagcccgtgattggtggtctactattctgggagataaagaagaatttgatcaaggctgtttg

SEQ ID NO: 3200 - DNA, 661 bp, Homo sapiens
  B1
  misc_feature [331]..[331]: Chromosome 7, SNP identification no. = rs17169835
  misc_feature [331]..[331]: allele = c, in linkage disequilibrium with rs17150810, respectively
  misc_feature [331]..[331]: n is a, t, c or g
tcaaataagactgggcacggtggccgactgctgtaatctcagttcttttgggaggccgacgtgggcagatcacgaggtcaggagtacgagaccagcctggccaacatggtgaaacactgtctctactaaaaatacaaaattagctgggcttggtggtgggcatctgtaatcccagctacctgggaggctgaggcaggagaatcgcttgaacccagaaggcagaggttgcggtgagctgagatagtgccactacactccaacctgggcaacagagcaaggctccatctcaaaaaaaaaaaaaaaaaaaagagataaaaatgacttgcttttnaaaatgtgtactttttagaacttaattgaactatcataattgtacctaattttgaaggtagttttttttaataatatttaggtatcagactgataactatagtctttctgttttgtttatgttctggtttgtactgattctgtcatattgtttgctggaatttagtaaaaattatatgacatcacttcatttgtatcaaaatttggtcttgtaggggacagttagtaaaatattttgtattttgaaaaatttccttttgtagaaattctttacaagaaaaataaatttattggacctggaaaccattcataccataatgaaattacacta

SEQ ID NO: 3201 - DNA, 661 bp, Homo sapiens
  B1
  misc_feature [331]..[331]: Chromosome 7, SNP identification no. = rs4723257
  misc_feature [331]..[331]: allele = g, in linkage disequilibrium with rs17150810, respectively
  misc_feature [331]..[331]: n is a, t, c or g
gtaggggacagttagtaaaatattttgtattttgaaaaatttccttttgtagaaattctttacaagaaaaataaatttattggacctggaaaccattcataccataatgaaattacactagctctatttggtggtagaaaacaattgttaaatccttgctttcattatcatattataatactaaaacctacattctagcttattcttatgcatcttcatgttttttaagtgacctttcaaacagtttaattctgtattattgtatcattgctatttgaaatttgtatttggtttatagtcatgggctttttttttgtgatctagtcattancctcttaaaaagaaaacttattataactattcttttgtttactgcatataaatattatccccttacattttttaaaaattgtttttcttgcctataattaaaacagtgggatctgcaggaaaatgtgaaaggagaaaattgtattggtaaagcagaagagtgggagtactaaactgcacagagcacctactaagttgttttgaaggaaaatttggtccctgattttccactgataggagatgggaaggccttctattcagaggatattggaaggttcctcaaccctgcctctgcccccgctatttgttaaagcatgtgatgccccagtta

SEQ ID NO: 3202 - DNA, 661 bp, Homo sapiens
  B1
  misc_feature [331]..[331]: Chromosome 7, SNP identification no. = rs4723258
  misc_feature [331]..[331]: allele = a, in linkage disequilibrium with rs17150810, respectively
  misc_feature [331]..[331]: n is a, t, c or g
tgaaaaatttccttttgtagaaattctttacaagaaaaataaatttattggacctggaaaccattcataccataatgaaattacactagctctatttggtggtagaaaacaattgttaaatccttgctttcattatcatattataatactaaaacctacattctagcttattcttatgcatcttcatgttttttaagtgacctttcaaacagtttaattctgtattattgtatcattgctatttgaaatttgtatttggtttatagtcatgggctttttttttgtgatctagtcattaccctcttaaaaagaaaacttattataactattnttttgtttactgcatataaatattatccccttacattttttaaaaattgtttttcttgcctataattaaaacagtgggatctgcaggaaaatgtgaaaggagaaaattgtattggtaaagcagaagagtgggagtactaaactgcacagagcacctactaagttgttttgaaggaaaatttggtccctgattttccactgataggagatgggaaggccttctattcagaggatattggaaggttcctcaaccctgcctctgcccccgctatttgttaaagcatgtgatgccccagttatttggccatgtaagagtcatgccacagaaata

SEQ ID NO: 3203 - DNA, 661 bp, Homo sapiens
  B1
  misc_feature [331]..[331]: Chromosome 7, SNP identification no. = rs4723259
  misc_feature [331]..[331]: allele = a, in linkage disequilibrium with rs17150810, respectively
  misc_feature [331]..[331]: n is a, t, c or g
catgggctttttttttgtgatctagtcattaccctcttaaaaagaaaacttattataactattcttttgtttactgcatataaatattatccccttacattttttaaaaattgtttttcttgcctataattaaaacagtgggatctgcaggaaaatgtgaaaggagaaaattgtattggtaaagcagaagagtgggagtactaaactgcacagagcacctactaagttgttttgaaggaaaatttggtccctgattttccactgataggagatgggaaggccttctattcagaggatattggaaggttcctcaaccctgcctctgcccccnctatttgttaaagcatgtgatgccccagttatttggccatgtaagagtcatgccacagaaatacctgccagagagaacaatttcaaacccacttctgcctaaactatctaaagttcagcttggttggaaactatacttactgattatctgaataacatactgtacactcattcatttctattagagctcactactggggtgctaccagtaggttacgaatatgctgagatactgcttccctcacagtttgtggtgagctgtgagcagcttcctctgttttccgaagcttgctatacaaaaatcattacatatgtgtgttccacatagaca

SEQ ID NO: 3204 - DNA, 661 bp, Homo sapiens
  B1
  misc_feature [331]..[331]: Chromosome 7, SNP identification no. = rs4723260
  misc_feature [331]..[331]: allele = t, in linkage disequilibrium with rs17150810, respectively
  misc_feature [331]..[331]: n is a, t, c or g
tagtcattaccctcttaaaaagaaaacttattataactattcttttgtttactgcatataaatattatccccttacattttttaaaaattgtttttcttgcctataattaaaacagtgggatctgcaggaaaatgtgaaaggagaaaattgtattggtaaagcagaagagtgggagtactaaactgcacagagcacctactaagttgttttgaaggaaaatttggtccctgattttccactgataggagatgggaaggccttctattcagaggatattggaaggttcctcaaccctgcctctgcccccgctatttgttaaagcatgtgatnccccagttatttggccatgtaagagtcatgccacagaaatacctgccagagagaacaatttcaaacccacttctgcctaaactatctaaagttcagcttggttggaaactatacttactgattatctgaataacatactgtacactcattcatttctattagagctcactactggggtgctaccagtaggttacgaatatgctgagatactgcttccctcacagtttgtggtgagctgtgagcagcttcctctgttttccgaagcttgctatacaaaaatcattacatatgtgtgttccacatagacaacactcatcattgtgttccaaa

SEQ ID NO: 3205 - DNA, 661 bp, Homo sapiens
  B1
  misc_feature [331]..[331]: Chromosome 7, SNP identification no. = rs4720106
  misc_feature [331]..[331]: allele = c, in linkage disequilibrium with rs17150810, respectively
  misc_feature [331]..[331]: n is a, t, c or g
ttatccccttacattttttaaaaattgtttttcttgcctataattaaaacagtgggatctgcaggaaaatgtgaaaggagaaaattgtattggtaaagcagaagagtgggagtactaaactgcacagagcacctactaagttgttttgaaggaaaatttggtccctgattttccactgataggagatgggaaggccttctattcagaggatattggaaggttcctcaaccctgcctctgcccccgctatttgttaaagcatgtgatgccccagttatttggccatgtaagagtcatgccacagaaatacctgccagagagaacaatttcanacccacttctgcctaaactatctaaagttcagcttggttggaaactatacttactgattatctgaataacatactgtacactcattcatttctattagagctcactactggggtgctaccagtaggttacgaatatgctgagatactgcttccctcacagtttgtggtgagctgtgagcagcttcctctgttttccgaagcttgctatacaaaaatcattacatatgtgtgttccacatagacaacactcatcattgtgttccaaagcctgtgtcataatattgtggggtgattattatatatggagattttctatcccagacacatgag

SEQ ID NO: 3206 - DNA, 661 bp, Homo sapiens
  B1
  misc_feature [331]..[331]: Chromosome 7, SNP identification no. = rs4720107
  misc_feature [331]..[331]: allele = t, in linkage disequilibrium with rs17150810, respectively
  misc_feature [331]..[331]: n is a, t, c or g
agaaaattgtattggtaaagcagaagagtgggagtactaaactgcacagagcacctactaagttgttttgaaggaaaatttggtccctgattttccactgataggagatgggaaggccttctattcagaggatattggaaggttcctcaaccctgcctctgcccccgctatttgttaaagcatgtgatgccccagttatttggccatgtaagagtcatgccacagaaatacctgccagagagaacaatttcaaacccacttctgcctaaactatctaaagttcagcttggttggaaactatacttactgattatctgaataacatactgtncactcattcatttctattagagctcactactggggtgctaccagtaggttacgaatatgctgagatactgcttccctcacagtttgtggtgagctgtgagcagcttcctctgttttccgaagcttgctatacaaaaatcattacatatgtgtgttccacatagacaacactcatcattgtgttccaaagcctgtgtcataatattgtggggtgattattatatatggagattttctatcccagacacatgagatgctataagattgtattctccaggggtaggtggggtgatgtgacttaggtttcctaatttttgataagttccaaaat

SEQ ID NO: 3207 - DNA, 661 bp, Homo sapiens
  B1
  misc_feature [331]..[331]: Chromosome 7, SNP identification no. = rs17169847
  misc_feature [331]..[331]: allele = a, in linkage disequilibrium with rs17150810, respectively
  misc_feature [331]..[331]: n is a, t, c or g
cctgcctcggcctcacaaagtgctgggattacaggcatgagccactgcacctggcctttttttttttttttttaatggagacaggtcttgctctgctgcccaggatggagtgcagtggcatgatcatggctcactgcagcctcaacctcccaggtgtgccccaccatgcctggctaatttttatttttattttttttgtacagacagtgtctccttgtgttgcccaggctggtcttgaacttcctgggctcaagtgatcctcctgccttggcctcccaaagtgctgggattattggcgtgagccactgagcctggcctaaaagttttcatnctctttagcagcaagtggttcattagtgtccatgacaagagtggatgtgtgggcacaatggtaatgagatctagatttgcaatgtatgaatggggagtgagtgggaggtggggagactatttatggctctttaaagaaacttagctgtgaattgaagaagggaggatgatgatttggagaccatggagggtcaagggaagtgggaaaaattcaatgtgtagaatagaggctttcattgatggagcagggacccagagaggacagtcagagatgggatcaggtgtgcagatggaaggattaaccttggacagatgtggaagcttttttcca

SEQ ID NO: 3208 - DNA, 661 bp, Homo sapiens
  B1
  misc_feature [331]..[331]: Chromosome 7, SNP identification no. = rs764127
  misc_feature [331]..[331]: allele = c, in linkage disequilibrium with rs17150810, respectively
  misc_feature [331]..[331]: n is a, t, c or g
actccaattctagaaataaactttccctccaggccacaggttggcatgtaatctaaattgtattattcagatcctctctctctccctcattctcactatctctctcaagagtctgaatcttgagttgagagaattaggaaagtaagtgccatttaaatgcatggggtgttcaatttcaattgtactatcaagattaacaaggaatccttctgtgttttactcggcttcttctaaagaatttcaggatccctgtaactcttctctcactgtctgatcacctaaaaaaaagtagaggtcaactgacattactgtttcaacctcccaacttganctgcaaatttctctacatcggtatacattcttaccttctttcctctggcactgtggaaaaaagcttccacatctgtccaaggttaatccttccatctgcacacctgatcccatctctgactgtcctctctgggtccctgctccatcaatgaaagcctctattctacacattgaatttttcccacttcccttgaccctccatggtctccaaatcatcatcctcccttcttcaattcacagctaagtttctttaaagagccataaatagtctccccacctcccactcactccccattcatacattgcaaatctagatctcattaccattgtg

SEQ ID NO: 3209 - DNA, 661 bp, Homo sapiens
  B1
  misc_feature [331]..[331]: Chromosome 7, SNP identification no. = rs17169855
  misc_feature [331]..[331]: allele = t, in linkage disequilibrium with rs17150810, respectively
  misc_feature [331]..[331]: n is a, t, c or g
gtggacttggccatcctgacctcctcttatccctgaagatagggctatattgacctatccatgaatcttggttatttagtgagtaaaagtggggatttagggcatgacaggatacatgggaagctcagcggggaatgttttaggaaggtttaaaggtttaagtcttctccaacccttctggactccattataacagtataattccattcttcctgatcagtgcctttacttttacttaagaaggctggagagatttgtcaggtcatttgttattgtaatttaaaacttaaagaatcagtctctgaatgagcttctcagtgattaagccccnctatctgagtagtaagtggtgagaaatgtttctgcagagtaccaaagaccctgagttttattctttacccttagatgacaattttgagatttaaacctatcattcttttattttaaattatccaatttaatttaaataaagctatcttcgataaagctatcttacatgtggtttggtgttcctccttgttcagctggctatggcagcagctgtccagtctactagagtttcacctgcaatgggcacagggtcccagatgactagagatgataacttgattaattgttctgttacaatgtaaagtgatacttaaccccacctagaacatga

SEQ ID NO: 3210 - DNA, 661 bp, Homo sapiens
  B1
  misc_feature [331]..[331]: Chromosome 7, SNP identification no. = rs10261756
  misc_feature [331]..[331]: allele = c, in linkage disequilibrium with rs17150810, respectively
  misc_feature [331]..[331]: n is a, t, c or g
acatgaatgggagtgttctgtgaaagggcatatacgcaaagtggccctcaaatactgaaggagctgagaaccaaagattgaggcagacaaatccagtttgtcagtatacagtgatttattaggtgaacttatgggcagaaatgtcctgggcagttgcaagacaggcagctctccacaccacaacccccagacccagggcttgtatcttggggaaaaaaagtatacatgctctgagaagaatgtgtaggtggctatgagtgtcacagcctatgatgtatgcagcaacatcaagtgctgttttggaggaaaggcaaaacttaaaatgaatagntgtttctgcataaagagtaatacatcaactagagatcttagaggagttcttggacttgagtttagtcaggagtcacatggcagattagcatttaaaataaagttactcttgtccccacaaggaatcttactgttttgtaccgcatttcaggtcaagaaccaattcccatactttggaggccaaggcaggtagattgcttgagtccagaagtttgagaccagcccagacaacatggcaaaaccacatccctacaaaaaatacaaaaattagctgggcatgaaggcatatgcctgtattcccagccactcaggaggctgaggtgggaggatc

SEQ ID NO: 3211 - DNA, 661 bp, Homo sapiens
  B1
  misc_feature [331]..[331]: Chromosome 7, SNP identification no. = rs10232564
  misc_feature [331]..[331]: allele = g, in linkage disequilibrium with rs17150810, respectively
  misc_feature [331]..[331]: n is a, t, c or g
tcctgggcagttgcaagacaggcagctctccacaccacaacccccagacccagggcttgtatcttggggaaaaaaagtatacatgctctgagaagaatgtgtaggtggctatgagtgtcacagcctatgatgtatgcagcaacatcaagtgctgttttggaggaaaggcaaaacttaaaatgaatagatgtttctgcataaagagtaatacatcaactagagatcttagaggagttcttggacttgagtttagtcaggagtcacatggcagattagcatttaaaataaagttactcttgtccccacaaggaatcttactgttttgtaccgnatttcaggtcaagaaccaattcccatactttggaggccaaggcaggtagattgcttgagtccagaagtttgagaccagcccagacaacatggcaaaaccacatccctacaaaaaatacaaaaattagctgggcatgaaggcatatgcctgtattcccagccactcaggaggctgaggtgggaggatcaattgagcctgggaggttgaggctgcaacaagctgtgattgcatcactgtactcaagcctgggcaacagagtgagaccctgtctcaaaggaaaaaaaaaaagaagaaccaattccaaatatgcttgcatgtttgcatgcctgc

SEQ ID NO: 3212 - DNA, 661 bp, Homo sapiens
  B1
  misc_feature [331]..[331]: Chromosome 7, SNP identification no. = rs11763306
  misc_feature [331]..[331]: allele = a, in linkage disequilibrium with rs17150810, respectively
  misc_feature [331]..[331]: n is a, t, c or g
tttttttttttttttcagtgacaaggtcttgttctttcgcccaggctagagtacagtggcacgattagagctcactgcagccttgaactccttggctcaagcagtccttccacctcagcctcccaagtagctgggactacaggggcatgccactgcactcagctttgcatgccattccctccatgtctctgttctgtcctcttaaaggacactaattgagtttgatcacacatctaattaactggacctcattttaacttgattacatgtgcaaagactctgtttccaaatcaggtcacattcagaggtacctggggttatgactttaacntatctttttttggggggacacaatttaacttacaacacccattctatcatttcccctgcttgtacttaagatgaaacattgcttatcaaggcactctatctagtgacgactcagaatcctttttaatacagtgttttcgacagccacaagcagttatagagttggcctctatgatggaatcagtttacaacattgtactagtcctttgataaaggggcttgctttgattgagttaaattatgactttgataccaaataaaggtttaggaaaaaatgcaatatgttagtacatttgactatagggatgtaaagctatttatgaaagctgtg

SEQ ID NO: 3213 - DNA, 661 bp, Homo sapiens
  B1
  misc_feature [331]..[331]: Chromosome 7, SNP identification no. = rs1406606
  misc_feature [331]..[331]: allele = c, in linkage disequilibrium with rs17150810, respectively
  misc_feature [331]..[331]: n is a, t, c or g
acacccattctatcatttcccctgcttgtacttaagatgaaacattgcttatcaaggcactctatctagtgacgactcagaatcctttttaatacagtgttttcgacagccacaagcagttatagagttggcctctatgatggaatcagtttacaacattgtactagtcctttgataaaggggcttgctttgattgagttaaattatgactttgataccaaataaaggtttaggaaaaaatgcaatatgttagtacatttgactatagggatgtaaagctatttatgaaagctgtgtgttattaaaataagtactctttaattacaccttntttgacagagtggcctttgtgtataaagcaagactgaattcttttaatttttagatttctcttttacacattagaaagcttatttcctaagagatttgctaatgtttgtttctccctctatctttttttttttaaattctctacagataaaataattgtgggtagctttatgggatacctaaggatctttagcccccatcctgcaaaaacaggagatggagctcaagccgaagatttgcttctagaagtggatctacgagatccagtacttcaagtggaagtaggaaagtttgtttcgtaagtaagcccactaattctggtattttactt

SEQ ID NO: 3214 - DNA, 661 bp, Homo sapiens
  B1
  misc_feature [331]..[331]: Chromosome 7, SNP identification no. = rs17169881
  misc_feature [331]..[331]: allele = g, in linkage disequilibrium with rs17150810, respectively
  misc_feature [331]..[331]: n is a, t, c or g
cagagtggcctttgtgtataaagcaagactgaattcttttaatttttagatttctcttttacacattagaaagcttatttcctaagagatttgctaatgtttgtttctccctctatctttttttttttaaattctctacagataaaataattgtgggtagctttatgggatacctaaggatctttagcccccatcctgcaaaaacaggagatggagctcaagccgaagatttgcttctagaagtggatctacgagatccagtacttcaagtggaagtaggaaagtttgtttcgtaagtaagcccactaattctggtattttacttggagtntgtcaatcctttacagtgtcacttttgtgtattcttcaaagaagactatccatgaattaaatatattttctggatattgtcacctaggggtttctcacgtatggaatgctttttatgtggaaactgtacatttaagatataataatttagggccttttaatagtaatagacttaagatgcctgacattatcagaagcttaaaaacaaagagataagcttttgaaaataaccaaataaagaaataaataagaagtatctacttatttaaagttatataagtgtccatttataattagatgaagtagcagataaccattactttttggttca

SEQ ID NO: 3215 - DNA, 661 bp, Homo sapiens
  B1
  misc_feature [331]..[331]: Chromosome 7, SNP identification no. = rs10241188
  misc_feature [331]..[331]: allele = t, in linkage disequilibrium with rs17150810, respectively
  misc_feature [331]..[331]: n is a, t, c or g
tttgctaatgtttgtttctccctctatctttttttttttaaattctctacagataaaataattgtgggtagctttatgggatacctaaggatctttagcccccatcctgcaaaaacaggagatggagctcaagccgaagatttgcttctagaagtggatctacgagatccagtacttcaagtggaagtaggaaagtttgtttcgtaagtaagcccactaattctggtattttacttggagtatgtcaatcctttacagtgtcacttttgtgtattcttcaaagaagactatccatgaattaaatatattttctggatattgtcacctaggngtttctcacgtatggaatgctttttatgtggaaactgtacatttaagatataataatttagggccttttaatagtaatagacttaagatgcctgacattatcagaagcttaaaaacaaagagataagcttttgaaaataaccaaataaagaaataaataagaagtatctacttatttaaagttatataagtgtccatttataattagatgaagtagcagataaccattactttttggttcatagctttgaggttttaaaatgaatagttatttggggtagagatgccctatcgtttcttgaaagaagtcagttcaacccacaaagtaagt

SEQ ID NO: 3216 - DNA, 661 bp, Homo sapiens
  B1
  misc_feature [331]..[331]: Chromosome 7, SNP identification no. = rs10270961
  misc_feature [331]..[331]: allele = g, in linkage disequilibrium with rs17150810, respectively
  misc_feature [331]..[331]: n is a, t, c or g
ataaccattactttttggttcatagctttgaggttttaaaatgaatagttatttggggtagagatgccctatcgtttcttgaaagaagtcagttcaacccacaaagtaagtcttccccctacaagagctttgtttcaaagtactttattcttaaatctaatttattttagaaaactgtttattagtttgaactttgggtaatatgtctgctttttatttactgatgatattgctgatcctcttattttcatacacaaactttcttaaaattaagcttgtatttcttcatcatttagaagtacgatgaacacttatcaagtagccagagtcngtttgcctcctctttttgagctcccttttgcctttttaaatctgggcagtaccctaagctctggattttggcattctacatttgtttatcataatttattggccccaggggccatttagtcagggccctaactcctgcttgaaaaccaaacaaccactcatgagcattcacattcttctagtgatatgttttattctgttgggaagctgtagcttagatgctttaggctgggatatgagatgagacttttatgctttgtgacaggctggattgcggagattttgtgaccgaagtggttggtaaatatctactccatctaaaagcagatgg

SEQ ID NO: 3217 - DNA, 661 bp, Homo sapiens
  B1
  misc_feature [331]..[331]: Chromosome 7, SNP identification no. = rs13240884
  misc_feature [331]..[331]: allele = t, in linkage disequilibrium with rs17150810, respectively
  misc_feature [331]..[331]: n is a, t, c or g
tgtgctcacattggaaggggaggaagttaacgttgttaagtagatagtatactaggcctttctatgacatcatgctcttttcctgagcatggtggaaaacttgttttgaatgtccagggtacatatacaaaatttccaaaggtgatactgattatgtgatagtcatgtatatttgcattttctactagtagagcaaatgatgagtatatattaattgtaacaatgttttgcagatgttatctaataagattcttatttgtaaataagatactaacactctgaaagtttaaatgatcatacatatagtaaggtgcagagtcagaacccccanctaggtctgcagacttcaattatagtccttgcagtttagaacagtctgttctaaacaggcgttgtacactggaggcctgcttgtacatgtgagcctgttcagtattttattttgttttattttgaggcggagtttcactctcgtcgcccagactggagtgcaatggcgtgatctcagcttgctgcaacctccgcctcccagattcaagcaattctcctgcctcagcctcccaagtagctgggactacaggcacgtgccaccatgcctggctaatttttgtatttttagtagagacagggtttcaccatgttggccaggctggtctcgaac

SEQ ID NO: 3218 - DNA, 661 bp, Homo sapiens
  B1
  misc_feature [331]..[331]: Chromosome 7, SNP identification no. = rs4723262
  misc_feature [331]..[331]: allele = a, in linkage disequilibrium with rs17150810, respectively
  misc_feature [331]..[331]: n is a, t, c or g
cacctggccgcctgctcagtattttaaatttaaaagagctgtcaacatttaagaaccaagagatttcacataaaacccaatgctttctggcttttcttgaaaaatgtggggctctggccccaagcccagaaccaagtaatagccacctcctttagtctggttcagtctccagttaatcacagccatttacactctttactcattaacaacccctggcttgatccttgaaaactgaatttaggatctctagactgtgccatgctagtttctggaaaccacttgagataggctgggaattgttgtggtgatattggtagtttatttctatttnagatttagtccaaacagaaatattttcaatacttgtaataaaatttcagatatggaagtgatatatgctacttgtaataatgattggtgttttgtgatgttttaacctttccaagatggtttcacattattttatttcatttcattgaacctcttatttttcatgagaaataggctcagggagattttagtgacttgcccaaagtcacggatgaattagtcagaaagccaggactagaacttggatttctttattgaaagaaatagcacttagggaaggacctcagatctgactttttcttggaagctctgttggcttcaatctgaaggc

SEQ ID NO: 3219 - DNA, 661 bp, Homo sapiens
  B1
  misc_feature [331]..[331]: Chromosome 7, SNP identification no. = rs17169913
  misc_feature [331]..[331]: allele = c, in linkage disequilibrium with rs17150810, respectively
  misc_feature [331]..[331]: n is a, t, c or g
ggctattacattttcatggtctactatttctgtgtatatgtatctttctagcagaggattcctcttaatcacctgcctctccagaattgtttccgggattgcctgtgactaatagaggccaattctgggtacttaagacacttgagtcttaagaaatgttctacaataacaaaattgattagatgctaagtcatagtggtttgaagtacattttctttggtgaacctcaagtattttctctttaccgttccaatttcttggtttttggttgtcttcactcagtcaggcttcatcaggtttcattctctgacatggttctgtgggtacaagnatagtgtgcggtttggtttttattaaaattatagtatgtggtttggtttttattatattttattttggcctttattaaatgtaagatataacttaaaaatttttatttcaattattagataagtttagttcaagttgagagttattttaatggatgtcagtgttgggggcattttttttatgggtatgagaaaactaagtgtctgtgaggctgttccttttaccagagatcctctcctttggagcttgctgtaaatgttaccttctaggatttggatttctcagacttattctcttcatttgggctttctttgtattttgctttcaattt

SEQ ID NO: 3220 - DNA, 661 bp, Homo sapiens
  B1
  misc_feature [331]..[331]: Chromosome 7, SNP identification no. = rs10269937
  misc_feature [331]..[331]: allele = c, in linkage disequilibrium with rs17150810, respectively
  misc_feature [331]..[331]: n is a, t, c or g
tattagataagtttagttcaagttgagagttattttaatggatgtcagtgttgggggcattttttttatgggtatgagaaaactaagtgtctgtgaggctgttccttttaccagagatcctctcctttggagcttgctgtaaatgttaccttctaggatttggatttctcagacttattctcttcatttgggctttctttgtattttgctttcaatttgagtaatgatgcatatttactgactgagttggatattcttaggcagtctcttttcagggtgaagatcttttagatttccaaggcaggcttggtaacctggcgtggtatatggnagacatccagtaaatacttgttgaatgaatgaatgaacaaatttctgggtagtgctgaggcaattgacagtggctttctttattactcttcaccatgttctgttttcgtccccttctctgttaccactatcattttatttcccactctgtttatgtcagaggcctgataaagtgtgctctcattgattttatggtaaaggacatggtttcatgttgctcctcctagtgtcagggcatttatttagtatgccagagtaaatggagaaggtattatcatacgatataggctactttattgcatggatctagttgttcttctgtttttgaccg

SEQ ID NO: 3221 - DNA, 661 bp, Homo sapiens
  B1
  misc_feature [331]..[331]: Chromosome 7, SNP identification no. = rs10224956
  misc_feature [331]..[331]: allele = g, in linkage disequilibrium with rs17150810, respectively
  misc_feature [331]..[331]: n is a, t, c or g
aggctgttccttttaccagagatcctctcctttggagcttgctgtaaatgttaccttctaggatttggatttctcagacttattctcttcatttgggctttctttgtattttgctttcaatttgagtaatgatgcatatttactgactgagttggatattcttaggcagtctcttttcagggtgaagatcttttagatttccaaggcaggcttggtaacctggcgtggtatatggtagacatccagtaaatacttgttgaatgaatgaatgaacaaatttctgggtagtgctgaggcaattgacagtggctttctttattactcttcaccntgttctgttttcgtccccttctctgttaccactatcattttatttcccactctgtttatgtcagaggcctgataaagtgtgctctcattgattttatggtaaaggacatggtttcatgttgctcctcctagtgtcagggcatttatttagtatgccagagtaaatggagaaggtattatcatacgatataggctactttattgcatggatctagttgttcttctgtttttgaccgtaagcctgttattttactaagtgggttacacaagccatggaggagaatttgcctacagttatagttacccagaatacttctttggcaattagttc

SEQ ID NO: 3222 - DNA, 661 bp, Homo sapiens
  B1
  misc_feature [331]..[331]: Chromosome 7, SNP identification no. = rs13236414
  misc_feature [331]..[331]: allele = g, in linkage disequilibrium with rs17150810, respectively
  misc_feature [331]..[331]: n is a, t, c or g
tattctcttcatttgggctttctttgtattttgctttcaatttgagtaatgatgcatatttactgactgagttggatattcttaggcagtctcttttcagggtgaagatcttttagatttccaaggcaggcttggtaacctggcgtggtatatggtagacatccagtaaatacttgttgaatgaatgaatgaacaaatttctgggtagtgctgaggcaattgacagtggctttctttattactcttcaccatgttctgttttcgtccccttctctgttaccactatcattttatttcccactctgtttatgtcagaggcctgataaagtgngctctcattgattttatggtaaaggacatggtttcatgttgctcctcctagtgtcagggcatttatttagtatgccagagtaaatggagaaggtattatcatacgatataggctactttattgcatggatctagttgttcttctgtttttgaccgtaagcctgttattttactaagtgggttacacaagccatggaggagaatttgcctacagttatagttacccagaatacttctttggcaattagttccttctgaagctccatgggggctctaagcagggcagagaggagggtatcttagaagctagaaattcgattagacactaggc

SEQ ID NO: 3223 - DNA, 661 bp, Homo sapiens
  B1
  misc_feature [331]..[331]: Chromosome 7, SNP identification no. = rs11766506
  misc_feature [331]..[331]: allele = g, in linkage disequilibrium with rs17150810, respectively
  misc_feature [331]..[331]: n is a, t, c or g
cttggtaacctggcgtggtatatggtagacatccagtaaatacttgttgaatgaatgaatgaacaaatttctgggtagtgctgaggcaattgacagtggctttctttattactcttcaccatgttctgttttcgtccccttctctgttaccactatcattttatttcccactctgtttatgtcagaggcctgataaagtgtgctctcattgattttatggtaaaggacatggtttcatgttgctcctcctagtgtcagggcatttatttagtatgccagagtaaatggagaaggtattatcatacgatataggctactttattgcatgganctagttgttcttctgtttttgaccgtaagcctgttattttactaagtgggttacacaagccatggaggagaatttgcctacagttatagttacccagaatacttctttggcaattagttccttctgaagctccatgggggctctaagcagggcagagaggagggtatcttagaagctagaaattcgattagacactaggccttccctggtcctgctcgaactatgggccaaaaagacagatgcctctggagttccactggggcttagagcacagacaagggataaaaagtgtacttatcagaaaaacgtactgaaagaaactggcatatt

SEQ ID NO: 3224 - DNA, 661 bp, Homo sapiens
  B1
  misc_feature [331]..[331]: Chromosome 7, SNP identification no. = rs11766521
  misc_feature [331]..[331]: allele = c, in linkage disequilibrium with rs17150810, respectively
  misc_feature [331]..[331]: n is a, t, c or g
ggtagtgctgaggcaattgacagtggctttctttattactcttcaccatgttctgttttcgtccccttctctgttaccactatcattttatttcccactctgtttatgtcagaggcctgataaagtgtgctctcattgattttatggtaaaggacatggtttcatgttgctcctcctagtgtcagggcatttatttagtatgccagagtaaatggagaaggtattatcatacgatataggctactttattgcatggatctagttgttcttctgtttttgaccgtaagcctgttattttactaagtgggttacacaagccatggaggagaanttgcctacagttatagttacccagaatacttctttggcaattagttccttctgaagctccatgggggctctaagcagggcagagaggagggtatcttagaagctagaaattcgattagacactaggccttccctggtcctgctcgaactatgggccaaaaagacagatgcctctggagttccactggggcttagagcacagacaagggataaaaagtgtacttatcagaaaaacgtactgaaagaaactggcatattaggtgacaatttgtttatggcatattgatatccttcaagtaagtgttgaaaatgaaagttatttgctatggga

SEQ ID NO: 3225 - DNA, 661 bp, Homo sapiens
  B1
  misc_feature [331]..[331]: Chromosome 7, SNP identification no. = rs11769811
  misc_feature [331]..[331]: allele = g, in linkage disequilibrium with rs17150810, respectively
  misc_feature [331]..[331]: n is a, t, c or g
atggagaaggtattatcatacgatataggctactttattgcatggatctagttgttcttctgtttttgaccgtaagcctgttattttactaagtgggttacacaagccatggaggagaatttgcctacagttatagttacccagaatacttctttggcaattagttccttctgaagctccatgggggctctaagcagggcagagaggagggtatcttagaagctagaaattcgattagacactaggccttccctggtcctgctcgaactatgggccaaaaagacagatgcctctggagttccactggggcttagagcacagacaagggatnaaaagtgtacttatcagaaaaacgtactgaaagaaactggcatattaggtgacaatttgtttatggcatattgatatccttcaagtaagtgttgaaaatgaaagttatttgctatgggaatggtgattttatagctcttttattctttgtgttcatttaaaagctttgtattctctggggactaggagttgtccaaactacattctcttaggccccacctcacttcccttctgtctttcatttcttcagcctcttgtgatgtgggctgacaatttgtatatttttcctggcttgggcttaaattgagaagcatgggaatgtttttgttct

SEQ ID NO: 3226 - DNA, 661 bp, Homo sapiens
  B1
  misc_feature [331]..[331]: Chromosome 7, SNP identification no. = rs1362367
  misc_feature [331]..[331]: allele = c, in linkage disequilibrium with rs17150810, respectively
  misc_feature [331]..[331]: n is a, t, c or g
tatgtcagatgtttagtaaatgcctcttgagaagtacacatcttttggaaaataatatttaaaacaacataatcagtacggctcacactcacacatctgtaaccatttattcagaaactgaagcccatcagaaagaaatctgagatgccatgtgatgctttctctttaccagagtatgataagataggccaacttcaggtcagcaagaccctgtttttttctctatattaagcatacatttgatgacacataacccaccaaaaagaagttagcaaaatagcctctgactattaagggttgttaggtatgtccaggagactgaccttagaanggctcctctagtttgaaaatatttgagaagggagcagttgaagaaaaggatgtcaagttcagctcacacgtttgtctgctgacactagtggtttcacttaaattagaaaatgtttgtgcttcccctgtgacagtaaaagctaggtaaaagttcaatctggaacttcaagaaacatattcaagagaacaaaaacattcccatgcttctcaatttaagcccaagccaggaaaaatatacaaattgtcagcccacatcacaagaggctgaagaaatgaaagacagaagggaagtgaggtggggcctaagagaatgtagtttggacaactccta

SEQ ID NO: 3227 - DNA, 661 bp, Homo sapiens
  B1
  misc_feature [331]..[331]: Chromosome 7, SNP identification no. = rs2160253
  misc_feature [331]..[331]: allele = c, in linkage disequilibrium with rs17150810, respectively
  misc_feature [331]..[331]: n is a, t, c or g
gccctgccttctccaattcatatacacacctgagggcacactctcaaatcaccactgctggcctctcctgtcagttctaaggtagtaccacagggaggtcctaggagagaaagtgaaaccaaaagcaaggtggatatttacagttttttggccacccagcacctatttcactctctttcattaatgctacagaaccaggttaaaggtgacccctttatatattgaccccatgttgtttacttcttcattcagactgaccattaactcaaagctcacggataccaaattcaaatttttatatcaattgctttaaacatagcccaaataaggntattttcagcctgttttgcataccctgaaaaactgcacccaacatccactagctacaggtaaaacaaaccctgagcatgtaaaagactgtatgttgctgctgccctccccagtcctgcttctcagcaacctggacacctaagccccactctaggtcctctctccccagaaagctcccctgacctctgccccttctgggttgaggccacctcactctctctggaaggtctcttgctgtaagggacctcctcttgaatgcaatcctgccaaagcaccacgcaaataaagcttattgtgttctactgccatctgatagccatgtcttttttct

SEQ ID NO: 3228 - DNA, 661 bp, Homo sapiens
  B1
  misc_feature [331]..[331]: Chromosome 7, SNP identification no. = rs10240664
  misc_feature [331]..[331]: allele = t, in linkage disequilibrium with rs17150810, respectively
  misc_feature [331]..[331]: n is a, t, c or g
tgtgtgtttgttttgtttaattcatattcttattaaattgctcagtagtgtgaaatgtttttagagacctttgttctgattcttggttctgtttttcttcatctgtctttcgcatattgtcttcccctgtccctctctctgcctttttttttttttttttttgtagtatgtttgtgggtttgccaggccagcctctttaccttgcttgagcaatcaagcttagcttggcccactctgtttgggcctgtttgcttttttatggtgctggtgaatttttcttgccttctttcctacccaatcagagaggagtttgttttccttcctgacgtantgttttgacggttggatatcatgcagtgtgtctgcttatcacctatctaggggcagtggagaagacatggggaggaagaagggttgtctgtagcagccttactgtaggatttggcttcaaccctctcttttgtgattttgctaagcatcttgaattactgtcacactacctggttggtctgtaacctgttatcttggaaggctgagagatattcttagattttggatcttctctcttactattcatcagttttccttgagtcagtgccatttgttgcttcccttgtttgtatttcattagaagctgtttccattcgccaccccctacttt

SEQ ID NO: 3229 - DNA, 661 bp, Homo sapiens
  B1
  misc_feature [331]..[331]: Chromosome 7, SNP identification no. = rs987501
  misc_feature [331]..[331]: allele = c, in linkage disequilibrium with rs17150810, respectively
  misc_feature [331]..[331]: n is a, t, c or g
agttggtagaacaagaaatagaaattaagtatactgtttgaacgtgcacaggtgaccagcaacagaaatgaaaacagtgatataattggaaggaggataagaaaaaggaagtgtcaataatcaaaacttctaccactgtggtacatcaaaatctaaataggataaatccaaaaatagggtgtgatcacacaatctagagataaggagtgaaccatcagaaaaaataaaggcatcagtgactcatattagagagtagggagaataatggggagagtgaggccttcatatgctttgtactatttgactttttatttttatcaaattaactacncatggttaaaagttattttgaatgtttctgggctcttgcaaggcttaaaataaatggtttatttttaaatgtataacaatatactgtatcttgctaacatacttctaacatccctctccttctaagatctcgttgcctaaaaacttcatccttatttttctagcagccctgcagcgaattgaaccatatttaaagagtctttttaaattatcccaccttcatttaaaattgccagtaaatgtgtgtggtgtataatcatttttaagttttgaagtgagaggaggaggaaaggagactgagtaagtataacattaaaaaaaaaatagattg

SEQ ID NO: 3230 - DNA, 661 bp, Homo sapiens
  B1
  misc_feature [331]..[331]: Chromosome 7, SNP identification no. = rs986554
  misc_feature [331]..[331]: allele = a, in linkage disequilibrium with rs17150810, respectively
  misc_feature [331]..[331]: n is a, t, c or g
tctctgtacactaaaatgtaagaaccactgttctagagagcagggttctcaaagtgtggttccccacgccagtagtattggcatcacctggaaacctgttagaaatgctaactctggggcctcatgccactcctactgaatcagaaactctgagaatggggcccagcaatctgtgtttcaataagcctcccaggtgattctggtagacactaaagtttgagaaccactattgtagagttttgtctcttctctctatagcaaacgtgtagtttttatcagccagcatgtattcccaaattctgtgtgattcaaataagactaactaccttancaacccctaccacctaccaagcagctgaggacttaaccaagatgtgggcccacagagtataccatcctctgacactagtggtgggctccagaattagcatatgacccaagctgggccacttggagcccttggcaaatccttgttggtcagagttattgggggagccccttgttttccactggagttactaagctggaggttgacaatgggtaagggaaaccaagcatgggactgagtactttatagacattatctcagatgctgattctttctccaggtaagttaagttttggatgataacaggagagccatgttgatatggtttggact

SEQ ID NO: 3231 - DNA, 661 bp, Homo sapiens
  B1
  misc_feature [331]..[331]: Chromosome 7, SNP identification no. = rs17150810
  misc_feature [331]..[331]: allele = c, t
  misc_feature [331]..[331]: n is a, t, c or g
agagtcttgctctgtcacccaggctggagtgcagtgccatgatcttggctcactgcaacctccgcctcccgggctcaagcaattctcctgcctcagcctcccgaatagctgggattacaggcgtgtgacaccacgcccgtctaatttttgtatttttagtagagacggggtttcaccatattggccaggctggtctcaaactcctgacctcaggtaatccgcccgcctcggcctcccaaagtgctgggattacagtcgtgagccaccacgcccggccagaacgaacactacttttctaatttccacatgtacgtttgtgtcagtcagcatnctagcaggaaatacaacatatcttggatgattaaaagatattttaggccgggcatggtggctcacgcctgtaatcccagcactttgggaggccaaaggcaggtggatcacctgaggtcaggagttcgagaccagtgtggccaacatgttgaaaccccgtctctacaaaaatacaaaaattagccggtggtggtggtggcgagtacctgtaatcccagctacttgggaggttgaggtaggagaatcacttgaacctgggaggcagaggttgcagtgagtcgagataacaccactgcactccagcctgggtgacggagccagactccatctc

SEQ ID NO: 3232 - DNA, 661 bp, Homo sapiens
  B1
  misc_feature [331]..[331]: Chromosome 7, SNP identification no. = rs10278228
  misc_feature [331]..[331]: allele = g, in linkage disequilibrium with rs17150810, respectively
  misc_feature [331]..[331]: n is a, t, c or g
tttttctaggagggtagggggaagtgggtgaccactattattttctgaattcaggaaaattctgtttttttttttaatttttaatttttgtgggcacatagtaggatatatatttatggggtacatgagatattttgatatatgcatacaatgcataatcacatcagggtaaatggagtatcctcacctcaagcatttatcctttgtattacaaacgatccaattagactcttttagttatttaaaaatgtacaattaaattattactgactatagtcatcctattatgctatcaaatattagatcttatttattctttctatttttttgnacatttagccatttctacctccccatcccccaactacccttctcagactttggtaatcatctttctttatctccgtgagtttaattgttttaatttttagcctccacaaataagtgagaacatgtgaagtttgtctttctgtgactggcttatttcacctaacataatgaccttcagttacattcatgttgttgcaaatgacaggatctcattctttttatggctgaatagtattccattgtatatatgtaaccacattttctttatccatttgtctgttgatggaagcttaggttgcttctaaatcttggctattgtgaacagtgctgc

SEQ ID NO: 3233 - DNA, 661 bp, Homo sapiens
  B1
  misc_feature [331]..[331]: Chromosome 7, SNP identification no. = rs10951380
  misc_feature [331]..[331]: allele = a, in linkage disequilibrium with rs17150810, respectively
  misc_feature [331]..[331]: n is a, t, c or g
tattgatatgtaaggacttactcctgccattttgttatttttttctggttgttgtgtggtcttctcttccttcctgtcttccttttaatgaaggtgactttctgtggtggtatgttttaatttcttgcttttttgtgtgtgtgtatctcttgtatgtttttgatttgaagttcctgtgaggcttgcaaagactgtcttattacccattattttaaattgatgacagtataaccctgattgcatgaacaaaaaacaaacatgcaaaagaaaactctacactttaacttcattcccctgcttttttttgtttatttttgattgttattatccncctgctttttaacttttgttgtttctctttatgtcttattgtactatgtcttgaaaattttttgtaattattatttttgattggttcatcatttagtctttctacttaatgtaagagtagtttacccatcatgactatggttttgtaatatttctgtgtccttactattgccaatgtgttttgtaccttcaggtgatttattctttctcattaacatccttttcttccagattgaagaacttctttagcatttcttgtaggacagttctggtgttgaggaaatctctcatcttttgtttctccttcatgcttaaaggatatttttgccag

SEQ ID NO: 3234 - DNA, 661 bp, Homo sapiens
  B1
  misc_feature [331]..[331]: Chromosome 7, SNP identification no. = rs10951381
  misc_feature [331]..[331]: allele = c, in linkage disequilibrium with rs17150810, respectively
  misc_feature [331]..[331]: n is a, t, c or g
tggtcttctcttccttcctgtcttccttttaatgaaggtgactttctgtggtggtatgttttaatttcttgcttttttgtgtgtgtgtatctcttgtatgtttttgatttgaagttcctgtgaggcttgcaaagactgtcttattacccattattttaaattgatgacagtataaccctgattgcatgaacaaaaaacaaacatgcaaaagaaaactctacactttaacttcattcccctgcttttttttgtttatttttgattgttattatccccctgctttttaacttttgttgtttctctttatgtcttattgtactatgtcttgaanattttttgtaattattatttttgattggttcatcatttagtctttctacttaatgtaagagtagtttacccatcatgactatggttttgtaatatttctgtgtccttactattgccaatgtgttttgtaccttcaggtgatttattctttctcattaacatccttttcttccagattgaagaacttctttagcatttcttgtaggacagttctggtgttgaggaaatctctcatcttttgtttctccttcatgcttaaaggatatttttgccagacacactattgaagggtaagggtttttctttccttcaacactttaaatattttatg

SEQ ID NO: 3235 - DNA, 661 bp, Homo sapiens
  B1
  misc_feature [331]..[331]: Chromosome 7, SNP identification no. = rs7777101
  misc_feature [331]..[331]: allele = t, in linkage disequilibrium with rs17150810, respectively
  misc_feature [331]..[331]: n is a, t, c or g
tgcttcatcaccattcctaccattattgcctgaatttgagccttctctgtttctcatgtgcattactgaaagagcattcctactggtctgtatgcctcatatcttgttccaggtctcccccggtttcttctccttctattctccatttttctgctttagagtaatattttcaaatcacaaatctgatcttgtctttgtcctgcttgaaattttttgtggcgccaggtgcggtggctcttgcttgtaactccagcactttgggaggctgaggtgggtggatcactttaggccaggagtttgagaccagcctgccaaaattggttaaaccccngtgtctactaaaaataaaaaaaaatattagcagggcgtagtggtgcatgcctgtggtcccagctactcgggaggctgagatgaaagaatcacttgagtctgtgaggcagaggttgcagtgagctgagatcacgccactgtactccagcctgggcaacagagcaagaccctgtctcaaaaaaaaaaaaaagaaattaaaaattcctagtggctcccatcacttgtaagaagaataacagggtttatataaggttctggccctgctaagccccctgatctgatcttacttcaggtcccaacttaacacaatacattaaaaaattaatttttt

SEQ ID NO: 3236 - DNA, 661 bp, Homo sapiens
  B1
  misc_feature [331]..[331]: Chromosome 7, SNP identification no. = rs12666753
  misc_feature [331]..[331]: allele = g, in linkage disequilibrium with rs17150810, respectively
  misc_feature [331]..[331]: n is a, t, c or g
acaaggatatctctgagataaaaagggttgtttatgaatgaattatccatttgtgagattaatactaacttcctcatatgtgtgtaaagtaacttcttacataacacattaaacctttcaactgttcatgtataatatatggcctaggtgtatgtgcttgtatatgtgtgtgtatatatctatatgtatgtgtatctgtttctaattttataaacaataaaatctaggtttgaacagaagccatagtctttgctatataattgaaacaacatgtgttttggtgtaggcaaatttaaggaaagtcgtaactctcaaacaattcatctgtttngaaaatggtttcaggactttatatgttaaacccataattctattacaattgttgagttttgtaacaagaagcatttgttctttgacttaagcctttagcagagtttaacaattagaaatttctcagaatgatgcatgctatctattgaagaaatagggggggttgagaaatgagccattcctggaaagctgaagtaatcttcaaggttagatctgaatcttggcacccattgtttgggtggctattggtgatgcgaaagtgttaatttatttttgtttttattctctctttttgttttgtttttgttttttctctttttgtttggttttt

SEQ ID NO: 3237 - DNA, 661 bp, Homo sapiens
  B1
  misc_feature [331]..[331]: Chromosome 7, SNP identification no. = rs12701289
  misc_feature [331]..[331]: allele = c, in linkage disequilibrium with rs17150810, respectively
  misc_feature [331]..[331]: n is a, t, c or g
caaagaaagaatatgtttaatgatttttaggagtgagaattttgcatttggtagcattgaatagtttaagtggcatcatttatgtttacacatgaaaatatatattcttctattccccttcctctttctttttttatgacaggattcagatctgaggtcttttgaaagtccacctgacataggtcatgaaggacttgcctttttcttgagcaggaggtggcaatcttagcatatttacttctaattaaaaccagaatccaatgttttactagggaatttattactacttttaagcaatgagaattttgaacttgggagtagagttttcttntataaaccttatagtacatttgggcctcagaattaaaaaaagctgttgactgcccattgtgcactaaaaaggctaaaagtcatcatgttagtagttttgtggcattctttttcattatagtgcttgttttatgggttttataaagatgcattaaaatgtagcagcttctgttggaataacatcaaattaagtttgtgcctttactggccacttttttgtccttgacaaaatcaactggacttttaaagtgatccacatgactgaagatggaaatatgtatgcactaaagattcaaagtcactgaggtagtggatacatataccagaagtg

SEQ ID NO: 3238 - DNA, 661 bp, Homo sapiens
  B1
  misc_feature [331]..[331]: Chromosome 7, SNP identification no. = rs6952877
  misc_feature [331]..[331]: allele = g, in linkage disequilibrium with rs17150810, respectively
  misc_feature [331]..[331]: n is a, t, c or g
aaaccttatcatcttgtgtttctgaatcaaaaatcactgccctttccactacttattggtactatatctacatttgatactctttccatatttgttcaatttgttgttttatgatataccatcctgctttggaaacagggaacagtcagggagtatcctaattagtgcccctttttggtactttgcctgctgataataatctcttgttttgtattgaaaagaaaaagactttgtacccaggctctaataattactagagctttaagtttaatctgagtatgcttttgaagtcagagttttatgaaatactaagggatctaaggatcattcngctcctttggtgtccactttgggcttccacaatttattctttgtggttgaatgatttttctcctaatttgtatattttccttgtagagttctcagccatgcttcctttatttcctatattttttatattgtctttccagtaggctttatctctttattttatttttttaagagcagatttaaccttaacctttcccctctcttcttaacagatcttagtgtttctagtgttaggcatacaatgagtacttagtcttttgacttagttctaactctgtaataccaagatggatactaaactctgtaataattttgaatcacagtctcttaa

SEQ ID NO: 3239 - DNA, 661 bp, Homo sapiens
  B1
  misc_feature [331]..[331]: Chromosome 7, SNP identification no. = rs9638888
  misc_feature [331]..[331]: allele = a, in linkage disequilibrium with rs17150810, respectively
  misc_feature [331]..[331]: n is a, t, c or g
agttctgcaggtttcagtcttctcgtgtataaaatgggactattgtctcttttttagagttactaaaaattataactaataatgctgtttaaatgtttaacagaaggccagaaatgtaacaggtgctcagtaaatggctgtagtagttaatattgctgttgttccatatttcttacagctcctgatataatactgagcatgtggtaaagactctttgagtatggttcatggcaaggtcatttaaatagcttctgaaatcccattgcttttgtgaaggcttcctgttggctctgttctgtcagaatgacaaaactttcatggctttttctgnactgttctttctattcccattatctgtaaggggagcctttggtatgtattctgaagtggtttccaaaacagtgatttgaaggatttatttatttatttttgagtaatgttttggatcaatctctacatatttctaaacatcagtagccaagattgtaataaataaagcatttttcacatactttgtatgcagagtgaaacacatggaataaaatctcagccaatctgaggtacagatgaataaattattttgcctagcttacttcagctcaacagacatttattaatgtatctcctatgtgccaggcattttatagttgctggatttaca

SEQ ID NO: 3240 - DNA, 661 bp, Homo sapiens
  B1
  misc_feature [331]..[331]: Chromosome 7, SNP identification no. = rs6953348
  misc_feature [331]..[331]: allele = g, in linkage disequilibrium with rs17150810, respectively
  misc_feature [331]..[331]: n is a, t, c or g
attctgtgtcttatgtgtgctataccatgttagggactttgacatctttcctctaactttggaactctttttcagcattattgagatatgattgataaataaaaattatatatcttcaaggtgtgtacaatgtgatgttctgatatacatatacattgtgtaatgattaccagaatcaagctaattaatattagtatggatcacttctcataattatcttcttttttgtgatgagaacaaagatctattctcttagcaaatttcaagtgtccattattattcactgtaatcactgtgctgtgcattaggtctccagaacttactcatattntaactgcaagtgtatatcatttgaccaatatttccttgctttccccatccctgacccctggtaagcaccctgctactctctgtttctatgaatttgacttttaaaaaatattacacgtatgagtgagatcatgtagtgtttgtcttttgttgtctggcttatttcatttagcatgatgttctctaggttcatccatgttgttgtaaatggtaggatttctttctttttttctaacatgtgaggtgatatctcattgtggttttgatttacatttccctgataattagcaatgttgagcaccttttcatatacctgttggcgatttgtatg

SEQ ID NO: 3241 - DNA, 661 bp, Homo sapiens
  B1
  misc_feature [331]..[331]: Chromosome 7, SNP identification no. = rs17170142
  misc_feature [331]..[331]: allele = g, in linkage disequilibrium with rs17150810, respectively
  misc_feature [331]..[331]: n is a, t, c or g
aatacttttcaaacagcattaatataaacaatttttatctctctaaaagagattcctgaatggttcagatgtatgtttagtgaacattcattcacagacaatacttatcctagaacatctttcaggctatttaaggttgataaatctattgtatcagttgaggtgggttagagtataatgcagtaataagcactccaaaactcagtttgttctctctctttttttctttttttttagcctcttttggtgatatgttttctttttaaaagttgcttagctgtatgattgtccttagtcagatacaagaagagtatcatctatttctatgcantttgatttctttttgagcactctttaaaatctaagtatgctatttaagattgtcactgatattcaaggtaataaagaatagttactatagtacttactgtatatggtgtatgagctagagatgacaaggtacaagattggccttttatttattcccttaatgagtagcttaattttcctctaacataatttttccctatgtaatacattataggatacactaatcacactagcaggacatgaaaggttatagccactagatctttctcagattagggatactaatgtatctatgttttctatgtatcagttttctatgataaactgtatc

SEQ ID NO: 3242 - DNA, 661 bp, Homo sapiens
  B1
  misc_feature [331]..[331]: Chromosome 7, SNP identification no. = rs13236865
  misc_feature [331]..[331]: allele = c, in linkage disequilibrium with rs17150810, respectively
  misc_feature [331]..[331]: n is a, t, c or g
ttctctgggttacatatcaaggttccaaaacttcctgccactcactgaggtgacagttctgtttattttgaaaataaatgattttggagggtttacttttgtgctctgtgatgcctcaatctatattttagttacctgctactgtttttacaaagcaatttggaagagtattaaattatgtggttgagtttgttattggtgcactacaggacctgtgaagcatttgtggttagtgagtcaaaaagcaccaccgtttagctgcacttggtgtagttgcgattagtgcctttctgttctgagagacatgtatggcactctttcataagatctngttacattggccctgattattctttcagcaatctcgacaagggaacttttttgtgtagcttatgttactgaacacttgagtggtaagaaaaaagatccaaatattttatttcagaatttccaaatctgcttggaattgtttggttttagaaatagatttttacatactttattggtcacagttaagaggaattaaggaagaaccataaaatagatgctcttgtaagtttgtcatcatctaattttactgtcaagtttaagtaataaaatactcttctgagttgtcttttaggaagagaaatggtttggatttggaaatcagtagtcaatt

SEQ ID NO: 3243 - DNA, 661 bp, Homo sapiens
  B1
  misc_feature [331]..[331]: Chromosome 7, SNP identification no. = rs7810388
  misc_feature [331]..[331]: allele = g, in linkage disequilibrium with rs17150810, respectively
  misc_feature [331]..[331]: n is a, t, c or g
tttttaaaaactaggaaaaagtgctttataaagtttatagattattgtgtacttttaaagtttaaaataatttataatttttaattataaactcatttataattttttaaatttctttcatacaggtaccaggtacttgcttttgcaacagatgcagataaaaggcaggagactgaacagcaaaaacttggttctggaaaaagactagttgtaaggcctttttttaatatataaaaatttcaataatgctatatctaatcacatatgtttgtcaataataattcatgggaagaaaatgtaaaaaaatatgtcagccattctctttcctatnttatggttatattaatgacctaagaattgagttggttgttgttgagcaatggaaacacatgcctggtcatggtcttaatataacagattgtagagttgtaccactagaactgtggatatccagatggagtcacttttaacaaataaaaatagaaacattaaaaaaatctctccttaataggcaaaattttgtagattatattctattgtttgaagtgtcttttttctctagctgctttccagattttctcttatcacttgtttggagcaatgggattataatgtgtacttttctttctctttttttgagcttaagatttgttaagcttct

SEQ ID NO: 3244 - DNA, 661 bp, Homo sapiens
  B1
  misc_feature [331]..[331]: Chromosome 7, SNP identification no. = rs7793862
  misc_feature [331]..[331]: allele = c, in linkage disequilibrium with rs17150810, respectively
  misc_feature [331]..[331]: n is a, t, c or g
tttctttcatacaggtaccaggtacttgcttttgcaacagatgcagataaaaggcaggagactgaacagcaaaaacttggttctggaaaaagactagttgtaaggcctttttttaatatataaaaatttcaataatgctatatctaatcacatatgtttgtcaataataattcatgggaagaaaatgtaaaaaaatatgtcagccattctctttcctatattatggttatattaatgacctaagaattgagttggttgttgttgagcaatggaaacacatgcctggtcatggtcttaatataacagattgtagagttgtaccactagaacngtggatatccagatggagtcacttttaacaaataaaaatagaaacattaaaaaaatctctccttaataggcaaaattttgtagattatattctattgtttgaagtgtcttttttctctagctgctttccagattttctcttatcacttgtttggagcaatgggattataatgtgtacttttctttctctttttttgagcttaagatttgttaagcttcttgcatctatgaatatttagtttgcataaaatttagaaatgttttggccattaattctttaaatattttgtaactagtaggcatgcgaccgaatatataagtaaaagataaa

SEQ ID NO: 3245 - DNA, 661 bp, Homo sapiens
  B1
  misc_feature [331]..[331]: Chromosome 7, SNP identification no. = rs7783612
  misc_feature [331]..[331]: allele = g, in linkage disequilibrium with rs17150810, respectively
  misc_feature [331]..[331]: n is a, t, c or g
gaaatataactgtcatgggactgatattcatgtcctgtccagtggagtcattttatataggtaagcaatacttgagccaaatagtaatcaaataatttcttagtgttgaattctagttcagcttaagatagtctgatgcacctacctatgttcactaggctgtctcccttctacagattgatcttatacatatactggcaatatttgcctttctggccagccccatttggattttataccttcttcaaatattttaatatctaaagtagatgaatacctaagatcatgtcttgatggccaaaaattcatcttgtctttaatgtgacttttnatgatcttttcttggatccattgtttgttgatcatagcctaactttcacagcagccctatttcctgtttatgcagatttttctctgtgaaaccatctcattattactttcatatacaatatatgcctgtcagggaccctggcttgggtccacagctctcccattttgggccgattaatggattgattgcagctctgcatctctcttgggtgaagccccaggagacaagacccttggctccaaccactgctaaggtccattcctctgctgcctctaagctggggagggaatataaagcttgagatctccccagagaggcagagtgcagcct

SEQ ID NO: 3246 - DNA, 661 bp, Homo sapiens
  B1
  misc_feature [331]..[331]: Chromosome 7, SNP identification no. = rs9638889
  misc_feature [331]..[331]: allele = c, in linkage disequilibrium with rs17150810, respectively
  misc_feature [331]..[331]: n is a, t, c or g
tgagtatgtgggattacaggtgcccgccaccatgactggctaatttttttgtatttttagtagagacagggtttcaatatcttggccaggctggtcttgaactcctgacctcgtgagtcacccgcctcgcctcccaaagtgctgggattataggcgtgagccaccgtgtgtggccatgaatttaaaatataaatttatttcattatatcctagtggaaaaaagaaatagctgaagtggaaggaatatatgaattttttataaatgtttattcacaacattatattttagtttctaaaagacttctctaaacaagaatagaaaaaaatgccnttttggttgataccattagtcttttaaagctgcatttcaaattttggtagtgtctattgacttcctattgtgaaacataaggaaaatagcatacttatattttcttcctctcttcttgccaaattctggtattattggtatattattatttattttgtcaaaatttaaaacacttccatacattttttgtaatcacaatttctatagtgctttcatcctgttgatatatctaaatggagtcaaagcttaccactagttcttttactattcctgaattatcttgattcatttcttggtgagttgagtttaatcatcctgtagttttgtgga

SEQ ID NO: 3247 - DNA, 661 bp, Homo sapiens
  B1
  misc_feature [331]..[331]: Chromosome 7, SNP identification no. = rs13224392
  misc_feature [331]..[331]: allele = g, in linkage disequilibrium with rs17150810, respectively
  misc_feature [331]..[331]: n is a, t, c or g
atagatagtgtagaggggccacgggcagtggtagaggttggaaagattcaagagggtagttataaaatatgttgcttcaatcataggtcactaacagatgtctgtacagttttctggttcatatagaacttggaattctgaatcagatggggcagtgagtttataatcagaaatgttaggtagagtgacagaactcttggctttcatgggttcctatcaaaagaggagagctttggtttagggcctaatgaatctgctattgcattgtggtatactgtaacttaacatgagttatgggggatgaaggaacagaattatgtcatagttcgtntattttttcttcctcttactattggtacctcagtaaacataatttggacaaattatgtcaatctcattgaaggattttgggggtaaaattagttgcatgatttttgatggtcatcgttacatgcatgcatatatttccattgtgtcagataaaaggtctttatgagatgacccctagatattatattgatggggcttaaaatggagaagcacaagaattgtgcttataatgtccttatagccatgtggctaaaccattattgaggtatggcctgtcatttggtacactactttcataaactgtagtatggctattttgataagtgtttta

SEQ ID NO: 3248 - DNA, 661 bp, Homo sapiens
  B1
  misc_feature [331]..[331]: Chromosome 7, SNP identification no. = rs17170174
  misc_feature [331]..[331]: allele = t, in linkage disequilibrium with rs17150810, respectively
  misc_feature [331]..[331]: n is a, t, c or g
taaaactggtagatgtgttttgcctattatagtttggtaattctggcatcatataccttaatctggaaacagtagaagaatcaagaaacagagaagcaagaaggaataaactctttttttaggcacctacttgccaccttttttgtggagtgggcaacaaaagatgtatctcacaatattaccaatgcagtggactcctggaagtttgttgattatattttatgtaggaacagaaaaagccaaaagcaggcatttgataatacttctgagataggttggtcaataatacattcagaatcatgaaaggatgcttctctttaaaaattgagcntaggacagatttaactttgttaaacacaaataccatcatcttattgaaaacttcttggacaattatagtaccttataaatagttatcaaagacagtttttcagtcctctatggttttaccgtagtgaacctttcaaaatttcattgggtagaaattttattacagccttttcttttttttaggagagatatgctcagttctcttatttgttggtaaatctagactttgaattgttaatttgaggataaatagaagagaaaggagagatgggagctatagaagcatcttaattcagtaatgtcatggttcaggaatattttcatttttttt

SEQ ID NO: 3249 - DNA, 661 bp, Homo sapiens
  B1
  misc_feature [331]..[331]: Chromosome 7, SNP identification no. = rs17170175
  misc_feature [331]..[331]: allele = a, in linkage disequilibrium with rs17150810, respectively
  misc_feature [331]..[331]: n is a, t, c or g
gttttggaataaaaatgatgaatggcttttcttttgataataatctgaaaaagtgtttgtattaaatccggtaagccagatatttgagttagtgaattgatattgtatgatggaaagtatctgaagcattttggtttcttgaaaggttatgttgtgaaaaatttgttttgtaagagtagacgtacaaaaagcatatgctattgttattacctagaatccaataaaagatagctttttgaaaattattaccacatgtgtgtaggagttgcttttgcagttaggttattttagataccagaataatttgtttcatattttaagcatagaaatnccccttcaaatttagtatccctgtgactctagcatgatatatgttagaaatagcacagaataaaatatcttggcaaataattgaagtaacacattctataagcaatctcttgaatgaaataaggatatttgcaggaacattgtatgtacgcggtatctgtgaggaatcttctcagctattaaatgcaagacttttgtcttaaacctcaaaattttaaaaagcaagaacacaaagcaatttgaatcacaattcactggtaaatgcaatatagcattcttttcaattttcaatttgtaacctatatttgcctttaaagtatcacttagttgt

SEQ ID NO: 3250 - DNA, 661 bp, Homo sapiens
  B1
  misc_feature [331]..[331]: Chromosome 7, SNP identification no. = rs11976613
  misc_feature [331]..[331]: allele = c, in linkage disequilibrium with rs17150810, respectively
  misc_feature [331]..[331]: n is a, t, c or g
acttttctataaatgtgctgtactctgtggtgtgtgtgtgtgtgtgtgtgtgtgtgtgcgcgcacaggcacgtatttgtatttgtgtgctttgtggataacactttgttgaaatgccctacttcttcccttattgaattcttgcttaggtcatttcttctaggaagcattcttttccctcactgtctgatttttttggtcttctcctttgtttatttatcttatatatctctatattactctctttacttttaagttccttgaggggaatgaccagtgtaacttgcccatctttagcctctagcgtggtgcctgaacattgtaggtgctanataaatattttttcattaatgaaagaagttgcgtcaaatatttataaacatattttgcttctggagtacgaaataggcacgtctgaaagttacatcattttctttttttctggttagcaattgtttagtctgtgaacataattagatttaacagtcttgtgttgactttctagtaagtctaataagagttagtttcaaaagaacagggtaacctctgagttcttgatacacaaacatttctttactacaaaaggtattttgttcagtctcccttctataacctctgtaatttttgcagttttcggtgacaacttctttttgtgcagaatt

SEQ ID NO: 3251 - DNA, 661 bp, Homo sapiens
  B1
  misc_feature [331]..[331]: Chromosome 7, SNP identification no. = rs7384587
  misc_feature [331]..[331]: allele = a, in linkage disequilibrium with rs17150810, respectively
  misc_feature [331]..[331]: n is a, t, c or g
tccttgctattacagtaagttttgtaccttcagatgatttcttattgctagttaacatccattttttttttttttttccagattgaagaactccctttagcatttcttgtagggcaggtctagtgttgatgaaatctatcagcttttgtttgtctgggataatctttatttctccttcacgtttgatggatacttttgctggatatactattctaggaaaaagtcttttttttctttcagtgctttaaatatatcatgctactctctcctggcttgtaaagttcccattgagaagttttctgccagacatactggagctccattgtagggnatttgtttcttttctcttcctgcttttaggatcctttctttatccttgccttttggagtttgattattaatgatcttgcagtagtcttatttgtgtcaaattggcttgctgttctgtaacctccttgtacttgaatattgatatctttctctaggtttgtgaagttctgttattatctctttgaataaactttctacctctatctttgtctctacctgctctttaaggctaatgccttttagatttacctttttgaggctattttctagatcttgtaggtatgctttattgtttttaaattattttttcttttgtctcctctgactgtat

SEQ ID NO: 3252 - DNA, 661 bp, Homo sapiens
  B1
  misc_feature [331]..[331]: Chromosome 7, SNP identification no. = rs11771086
  misc_feature [331]..[331]: allele = g, in linkage disequilibrium with rs17150810, respectively
  misc_feature [331]..[331]: n is a, t, c or g
taaaatttggggtgcaataaatactatttagggttttaagatttccttggtatctatatatagtagtaaaaaccagactttgacaatgtgataacctacaatgttcctattttgcataaaatgaagccaaacaagagaacattaggtccaatgcatgttctttttatttgtttttaaaactagtattcttttgttttagtgtattaggaaatgaaagaaaccatttattttctatctattgagctatatttcaaataatttcatgttacacattttatagattggctttgttggaaaaataaaactagttaaatgtttttaatcccacaantatttaatttttaagtcactgattgaaatttggtcactgggaatggaaaatagaactttttttttcttaaaaaaggataaggttttccttcttttatttatttatttatttatttatttatttatttgtttatttagaaacggagtttcgctcttgtgtcccaggctggagtgcagtggcgcgatctcagctcactgcaacctccgcctcccggattcaagtgattgtcctgcctcagcctcctgcctatctgggattacaggtgcacatcaccactcccagcaaatttttgtatttttagtagagatggggtttcaccatgttgggcag

SEQ ID NO: 3253 - DNA, 661 bp, Homo sapiens
  B1
  misc_feature [331]..[331]: Chromosome 7, SNP identification no. = rs11978733
  misc_feature [331]..[331]: allele = g, in linkage disequilibrium with rs17150810, respectively
  misc_feature [331]..[331]: n is a, t, c or g
ggctttaatgtccctaaacaaattacatactatattatcattcttgatacagctttttgaaatttattcattcacccttgttttggtgctatgtgtttttttaaattgtggtaaaatacacataacataaaatttaccattttaagcattttaaaatgtacagttctgtggcattaggtacattcatactgctgtgcaatcatcaccactatccatctccagaactttttcatctttacaagactgtatctctcaaccccctcccccagcccctggaaaccaccattcaactttgggtctctacaaatctgactactctaggaatctcatntaaaaagaatagtttttagagtacacgtggtttttgcttacatggataagttctttagtggtgatttctgtgattttggtgcacctgtcatcgagaagtatatactgtacccaatatatagccttttgtccctcacccctctcccaaccatcccctcctgccagtccccaaagtccatgtcatcattcttatgcttttgcatcttcatagcttagctctcacttataagtgagaacataccatatttggttgtctaagttacttcacttagaataatggcctcctgctctatccaagttgctgcaaaatacattgtttcattccttttta

SEQ ID NO: 3254 - DNA, 661 bp, Homo sapiens
  B1
  misc_feature [331]..[331]: Chromosome 7, SNP identification no. = rs11764582
  misc_feature [331]..[331]: allele = g, in linkage disequilibrium with rs17150810, respectively
  misc_feature [331]..[331]: n is a, t, c or g
tccttaatattctataattattttcctgttaaaatataagacttgtgatctagccaagtctttaactcttttttggctcaaacacaactattctttgttactgttgttattttcattacctatctccttgatttgtattttgaaagggcctagcccattgttggggttcaataaatatgtgcatgagagctatcatgattgtgcaactaaaccaaatgcaaacccttcttgttacaatgtaaaattctgtgattattgtctaagtagacatcgttgtgccaggaaaagccagactgctctttttcaaatggcttattactacttaaagganttttcatttttacttaaaactgagttctcataagactttcctggtcactattttcaactctctacttggattgatggctttgcacaggttatttaccttctctgaacctctattttttaaactgtaaaatagggatactttttcatctgcaaagttattttgagtcttaaccacagttggttaaaggcatgggctcaggattctggcagatagcagttaaattgtggttctgccacttgcaatcaaagtggccttgggcaaattacttagcatctctgagccacagtcttttgtaaaatggtttatgatggtacctgtcaaacatttttg

SEQ ID NO: 3255 - DNA, 661 bp, Homo sapiens
  B1
  misc_feature [331]..[331]: Chromosome 7, SNP identification no. = rs11773504
  misc_feature [331]..[331]: allele = a, in linkage disequilibrium with rs17150810, respectively
  misc_feature [331]..[331]: n is a, t, c or g
gtatctcattgtggtttttagtttgtatctccttcataactaaggatattgagcatctttgcatgtacatattgccaatctttattcttttgagtaaagtctgtttagcttttgtgcacagtttctacttgatagaatattttaatctattacttactgtattatgttttgtgactactcattttttcctcaggtaatattttctaattatttgctagttatgtttaagtagttacgatagtctatcagtttgaataaaatgtaattttctattgataacaatttctgtttccttaggtcacactgcagaacagagtgatattgcaaaaanccaaattatcagtctacgtgcaaccaccattagaattgacttgtgatcagttcacctttgaatttatgagtaagttttttgttttggctgaaagtctaccatggtgtgaattttttaaaaatactagtttgttcatttaatggctattatttcatgtctgaatggtgagattgggatcgtcccaaaatcaatgattgtgttgttttgcttatattttccctcttagcatcagcatgaacgttcaatcaatgattgttgggtcaaattaatcttttacgattacagatttctaggtgcttttctgaacttgttggacctataattgttttt

SEQ ID NO: 3256 - DNA, 661 bp, Homo sapiens
  B1
  misc_feature [331]..[331]: Chromosome 7, SNP identification no. = rs4270863
  misc_feature [331]..[331]: allele = t, in linkage disequilibrium with rs17150810, respectively
  misc_feature [331]..[331]: n is a, t, c or g
tgtgttgttttgcttatattttccctcttagcatcagcatgaacgttcaatcaatgattgttgggtcaaattaatcttttacgattacagatttctaggtgcttttctgaacttgttggacctataattgtttttgatttatttatttatttttgagacagggtctcattctcattggcccagactggagtgcagtggcaccatcatggctcactgcagcttcgacttcctgggctcaagtgatcctcccacctcagcctcctgagtagctgggactacaggaaaacaccacctgactaattttttgtatttttagtagagacggggtttngccatgttatccaggctggtcttgaactcctgggctcaagcaatttgcctatctcggcctcccagagtactaagattacaagcgtgagccaccactcctggcctgtttttagatactaaaatttagaaggctttctttattggtgtttctttagtgatctatttattgaatcggtaatgtttgaagaattaatatggactttggagtttggcctgagtttgaatccagctctaacactcacttgatgtgtaaccttaggcaaaaactacattagtaatcacttggagcctcatttattttaatctgcaaaaagggggtaatgatatttgt

SEQ ID NO: 3257 - DNA, 661 bp, Homo sapiens
  B1
  misc_feature [331]..[331]: Chromosome 7, SNP identification no. = rs11769616
  misc_feature [331]..[331]: allele = g, in linkage disequilibrium with rs17150810, respectively
  misc_feature [331]..[331]: n is a, t, c or g
ttataaaaaagaggaactggattgactttaaaggggaaagttaaaagaaaataaattcaaaaagtaactggaaatattaatattatgtattttcccctttattgagtcttttttgctgtttggctagatcatatatctttacttgtttttttcccacatttacagtggaataacacattctcatagacttctgagaatggaaatataaataaatgtattgttgggtttcatttatttgtgttatactctcaattgtggattgacttgtgtttggagagtcatttaagtcatctgtgagaatcttgaaattttaatttgtattttaagcagntatgtgtcaaatttgtgttgtaactttaccacagataatttgttgccttcttttccccctacccatttttgcattgcctgtgatggacagatcgaaatcctgatggtaagtgtaaagataatttagaaaaaaatgaatttcagaactgaaatttgatgaattgaattggtattataccatgaatgaactctttttatggactgctcttttaactagaagaagttctttaggatgatacagtgccttgattctgctatggagagcatagtagatgtttccacagagacttgtcattattagttgtttcggagtcatgagaaagaatgaaat

SEQ ID NO: 3258 - DNA, 661 bp, Homo sapiens
  B1
  misc_feature [331]..[331]: Chromosome 7, SNP identification no. = rs11763712
  misc_feature [331]..[331]: allele = a, in linkage disequilibrium with rs17150810, respectively
  misc_feature [331]..[331]: n is a, t, c or g
tatggagagcatagtagatgtttccacagagacttgtcattattagttgtttcggagtcatgagaaagaatgaaattaggagtaaaaatagaatgtcttttttgaaaaatattaaaggtgttattgacaacttattactgcaagtcattggttatttagctgcatgctctgttattttacctaaaagaaagaaagagtttaaaaaaagtgtttgtcactgaattctaagttgtgtttttctacatcctccaagagattcacctctctgtgataagaatggtgtgtgtgttcgctctgtgggcatattccttgtcttgtttagaatttgtangggaatgttatcaaacatctgactccctctaacttgcttgggtcagtgttgttactcactttgttttccccaaatcttttgtttgactctgctatgattctgatcacaatatgaacttaattaagtttgttccttaggttctccttttaggttttgagctttttgagggcaggggtcaagcactcatctttgaattgcatactaacagagtacatagcaggcactacaagtatctctgattatttttccctcttagatatagacttaatgtggtagtttatctttataagttattttaagatacattttagatagcaatattaattagta

SEQ ID NO: 3259 - DNA, 661 bp, Homo sapiens
  B1
  misc_feature [331]..[331]: Chromosome 7, SNP identification no. = rs10951387
  misc_feature [331]..[331]: allele = g, in linkage disequilibrium with rs17150810, respectively
  misc_feature [331]..[331]: n is a, t, c or g
tgaattgcatactaacagagtacatagcaggcactacaagtatctctgattatttttccctcttagatatagacttaatgtggtagtttatctttataagttattttaagatacattttagatagcaatattaattagtaataattaaataaatataatgaaatgacttaaagattgtggcaatatttactaatgccgtttgggtgatgccaacaatctgagttgcatagcacatgtcatcttgatatctggaagttatatatatatttatatgagaagtgttttaatagaagtaaacgattagcttaataacacaaagtatacttgtcanattagaatttgggtcattaaaaaataacctgatattaataatgaatatttacattttaattagctagattgcctgtaatttttaagattttggaccaaattttgtaaaatatcatgttattatttaaatgattagttttaagtttaaaaaaatcagttaaggttattgttcaaagaaatttattccttcttactgtaaattcagcccaaactatgaggaaaaaacccacaatttatagaaatggtagtgtttcaatacaaagtgaaagctggttttaataatctctttgatatattttaaaattataattaagctttagggagtggagtt

SEQ ID NO: 3260 - DNA, 661 bp, Homo sapiens
  B1
  misc_feature [331]..[331]: Chromosome 7, SNP identification no. = rs10486529
  misc_feature [331]..[331]: allele = a, in linkage disequilibrium with rs17150810, respectively
  misc_feature [331]..[331]: n is a, t, c or g
ttgctatttttaagcagctccctgactcctctataaagaaataaaggaattaatgtgtggattcatcaagtagagttagaacattttgagtgttcagtttttctacagcactatggcacggcataggcttctatatattatctttcatcttaaccagtcaaaaacagagttctagaaaaaaggagagaaaactaggattttagtattgcttttctagatttataagtagagagcctaatttgctttggtttcaatttcattttctgtaaaaatattgaaaatgattttgaaaagctttatacaaattctaatatgaaactcttcattgtcntatattcagctacctatttcagtatgcatgtatgagtattaaaatcatttaacaattgaatgactgtctaaatgtctaaaatgtcacttaaagtgatatgtaaagttaaatggcttgagaaaagtataattcatataaaggtaatattctacatattaatgtgtaaaatgaacatggacttcaatagaacttcagaagagcaaatcttgctttcatgttcataatctgaatcttcatcaagtaaaaaaagctaaagatttaaaatgtttttgagtagagaaatttttagatatggtaatatacagtcttaaagatatgatagaaacttca

SEQ ID NO: 3261 - DNA, 661 bp, Homo sapiens
  B1
  misc_feature [331]..[331]: Chromosome 7, SNP identification no. = rs10486530
  misc_feature [331]..[331]: allele = g, in linkage disequilibrium with rs17150810, respectively
  misc_feature [331]..[331]: n is a, t, c or g
ataattgttaagtaagagtataaaaatgcctcaaggatttttccctcctttgcctgttcaaaggtgaatagcttatatcaacaaggtaataaggtattccttttaagtttgattaaaattatcataataattattttgctatggtattcagaaataaaaatcaagtgtttctctttagactgaatttttttggcttggaatgtaaatatttattattcatctttatggtaggtttttggatatatctgtcttctaagtgtataaatatttattattttcattgtaggcttttgtatgtgtaccttttaaagtatattcttatgtctctganaagtaatcttataagtagatgctctttgtactgttttattctgctgtctacagcagctagagggtgtgcatcctgtgcttctggttgtttagaagggtttcatatttaatgcttcaatatcacagtgaacatttggggtaatttgtgatggtatgacttggagagaagtgtcagtttttctttctgagtggcttagaaactaaagaagcttttttggatcaaacatccttagtaaccaaggtttttagtgtgtcatgtcattaattttcttgatggtggggtagaattgaagaataaaatcttggaattaaatcaacccttttaaatcct

SEQ ID NO: 3262 - DNA, 661 bp, Homo sapiens
  B1
  misc_feature [331]..[331]: Chromosome 7, SNP identification no. = rs17170203
  misc_feature [331]..[331]: allele = c, in linkage disequilibrium with rs17150810, respectively
  misc_feature [331]..[331]: n is a, t, c or g
aaacttattagtttcttgggtctcctatactaccttaggaacatagttggaaattatatgttgaacaccaaatttattggtggctttgaaaaacgtttaaacacctgacttctgaggaagggttgatctttactgtagataaatgcaacccaattagaattgaataaaaacacatgcctttgagcagaaaggtaaagtccataagatacgaattgtatagtgtgtactaaagaaagcttagatgacttatccattttcctcctgattttgggctcaattgttttgatgtcattatgctcatcagcatatatttgcttcttactcactttangaatgggacacaatgacaaatttttaaaaatttcttctgggatccaatatatatgatatagagtggtttttaaaaaattcctggatttgtattaatgttaaacatgctggatggaatcatgtgcttgtttaaaataagtatcacttcactctgataaaagtaagacttagataaagttgccattgcaaatcttctgtgtctgttttttttaactgaaagaagcaaaattaatgagctttatagagaagaaataaaacaacttttactctacatgtcttcccatttgtttattccagttctctttctgtgaacaaatataggtatatttaa

SEQ ID NO: 3263 - DNA, 661 bp, Homo sapiens
  B1
  misc_feature [331]..[331]: Chromosome 7, SNP identification no. = rs1419899
  misc_feature [331]..[331]: allele = g, in linkage disequilibrium with rs17150810, respectively
  misc_feature [331]..[331]: n is a, t, c or g
aggtcctgtcctattccattatttgattttgtgtacctacactatgctaagtcagggaattgccatacattcagacaaagagaataaatcagatatataattgatttttggtaaaatttagatagcagtaaggtaatcgtgggcaacatcagggttctacttgttactttatattaaaagttataaataaaatacattaggatataaatatattcatttgcaaaaatttttgccttttttaatggtctcatttgcagattcattatatggcaccatcaactgcagtcaaacaaatgtgtacaatttcccaaagaaatgttggcataacttntttagtttaaccaaggataactgttaaactaagagaaatgcaccaaaatggttctaccatccaactggagattaaagctaatcaaagcaaaatggtgctatgtacttacagttagcaatattgaactatacatttgaaattttaagtggatagatctcatgttaagtcttcttatcaaaataaaatgatttgttttttaaaaaatgatgccaatgtaaagaatactgcaatcatgaccaatcagaaaaatcatgaaaataaagaatctcctctttcttctcagagttgttatttctgtgacctattattgagtcttcaatagtatctgag

SEQ ID NO: 3264 - DNA, 661 bp, Homo sapiens
  B1
  misc_feature [331]..[331]: Chromosome 7, SNP identification no. = rs13234292
  misc_feature [331]..[331]: allele = a, in linkage disequilibrium with rs17150810, respectively
  misc_feature [331]..[331]: n is a, t, c or g
ggttttacatttaagtctttaacccatcttgagttgatttttgtatgtggtgtaaggaagaggtccagtttcaatcttttgcatattgctagccagttattccagcaccatttgcgtgtttttgtcagctttgttgaagattagatggttgaaggtgttcagcattatttctgggctctctcttctgttctgttggtcgatttgtctggttttgtaccagtatcatgctgttttgtttactgtagccctgtagtatagtctgaagtagggcaatgtgatgcttccaattttgttcattttgcctaggcttaccttggctatttgttatatnttttttgtttcatgtggattttaaaataattttttctagctcttgaagactgtcattggtagtttaattggaatagtatagaatctgtaaactgctttgggtagtatggccatttcgatgatattgattcttcctgttcatgagcacagaatgttttttccatttgtttgtgtcatctctgatttatctgagtagtgtttttgtagattcttattgtagagatctttcacctcccttgttaattatatttctagatattttattctttttgtggtaattatgaatgggattgtgttcctgattcggctcttggctttatgtacaaaatca

SEQ ID NO: 3265 - DNA, 661 bp, Homo sapiens
  B1
  misc_feature [331]..[331]: Chromosome 7, SNP identification no. = rs6968365
  misc_feature [331]..[331]: allele = g, in linkage disequilibrium with rs17150810, respectively
  misc_feature [331]..[331]: n is a, t, c or g
ctttgtttctgcatcacagtattttcataggtctgtttcatatgttattcacttgtttattttctgcccttctcactagaatgaggactaggatcatgtatgtgttgttcactattatctccctagcacttatcactcagcaatattttttgaataaatgaatagatgcagtgttaccttgagtcttatttaaactataaacaagaattatcttctattacctctcttttataaagagaatttcgtccctttgatttgtctctttcctttgaacctactgcatgtgatgtttctctgttactttatctttagagagggaagtctttgcccnatatggggggattgagatgggcctttcggagagctcataggcccctgttgaggtaatccaaatttttataaaaggagaagagaaaagcttagacttattcacatttcattttgtcagagatttttttgtttgtcaggacagtaaaaggaaggagctccataggcagctgaggcagacacttgacttcgctggaggaagagtttggggcactgctgcctttcttggttagcccacagcatcccccattttctttcatacaacacacatgcccagtgtaagctatgagtgaagactcagcctagcagtttcactgaggtattggagtaggtc

SEQ ID NO: 3266 - DNA, 661 bp, Homo sapiens
  B1
  misc_feature [331]..[331]: Chromosome 7, SNP identification no. = rs4723280
  misc_feature [331]..[331]: allele = c, in linkage disequilibrium with rs17150810, respectively
  misc_feature [331]..[331]: n is a, t, c or g
aaaattttcttggttaggctgggcatggtggctcacgcctgtaatcccagcactttgggaggcctaggcgggcggatcacgaggtcaggagatcaagaccatcctggttaatacagtgaaaccctgtctctactaaaaattcaaacaattagccgggcatggtggcaggcacccataatcccagctactcgggaggctgaggcaggggaatcggttgaacccgggaggtggaggttgcagtgagccgagatcgcgccattgcactccagcctgggtgacagagcaagactccatctaaaaaaaaaaaaaaaaaaaaaaaaaaaattcatgnttatttgaaaattagcagcaatttaaaggacagtctatagtagcagtggaatattggaaagaacactgggcttggaattcaaacaccgcagtgttgttgcttattagatgtatggtttttggcaattcccttaccctcccagaacttctgttttgttccataaaatgagatgactactcttttgttacaaagattatattccataatgtatggaatttacaaaatttgttccacaaatatagactgccaatttcgtgtgtgtgtgctggggtaattatatgattcttcagtcagtaggcaccaatgccctgtctgttccacacctctttt

SEQ ID NO: 3267 - DNA, 661 bp, Homo sapiens
  B1
  misc_feature [331]..[331]: Chromosome 7, SNP identification no. = rs10464225
  misc_feature [331]..[331]: allele = a, in linkage disequilibrium with rs17150810, respectively
  misc_feature [331]..[331]: n is a, t, c or g
gacaattctctatgcctggtacggcactatctaatagatagccacatatagctaattcacacttgaaatgtgaattttatgttatgtgtgttttaccagatatattaccacagataacaactttttgaaaactgggttgtagtcatggaactcctgttcttcattggtatttctgagggagccgttttctctttcctgtctataccctatgaacttgtttctctggtctcagaatgtttagagttttgaattattccatatatgagttagtttattcctgttcactgaaaagagagcagttagataactgaatggtatgcttgagtgaatntaaaggtggatgttctcttactctgtctgacccttgctagtttctcagccaaacaagagcaatatacaaagctctttcaaaattttgtaaatttttctttattcgggtcagagtaatctccaaagagtgtttgttataagtatgtccctgatgtattcactatctgtgtgtgggtatagagtctagccaaactgtctgacagaaatttgttcaagtcacaaatgtgagccacatgtattatttttaatttcctagaagattaaaagagtaaagtgaaacaagttaaagtaattttaaccatgtattttatttaattaattaatttatttt

SEQ ID NO: 3268 - DNA, 661 bp, Homo sapiens
  B1
  misc_feature [331]..[331]: Chromosome 7, SNP identification no. = rs929524
  misc_feature [331]..[331]: allele = t, in linkage disequilibrium with rs17150810, respectively
  misc_feature [331]..[331]: n is a, t, c or g
ctgtgtattaatatacagagaaacatatcggggttgatataactgctcagctgttcatagatatgcttataaaaacagtacatctttttcttttgctgagaaagatcacaaaataatctctcaaggaaactggctttgttttcctctacttaaagagagagagaaaatgacggtaagggaaggaaggtggacgggaggattgtgagggttataagggttgtaataatcgctaattcacaattcaaactgttcagaactcctttacaaaaaactaatacaaaaagaataattgtgccagatgggattaaacaggaagatagataacagaaangaaagaaatcctcatacaattacagataattggaggccacttatgtatttttctgtcatcactgacacaaaaagataagattttcatttccacataatgagcccattaatagttttattgtaatattagaaacatcttgtttctgagtatatctcaaaggactattttttttttaaagatcaaacaacaaacagaacaaaattttagcagaagaggggacacactgattacttctgactcagaatagtttatttcagaaaagtgatcaaatttctgaatctgataaacttaccaagataaaatcctaatattaaatttacaatacagcca

SEQ ID NO: 3269 - DNA, 661 bp, Homo sapiens
  B1
  misc_feature [331]..[331]: Chromosome 7, SNP identification no. = rs13230868
  misc_feature [331]..[331]: allele = c, in linkage disequilibrium with rs17150810, respectively
  misc_feature [331]..[331]: n is a, t, c or g
gccttttccagttatctgtgatctcttctgcctttaaaccttaggagtgctatgattaaacctctgttgtgaaatttacttatattattctgtcttatgttatggtttcttgggtacttccatcttttctcctggtgagcctggacaactggggccatttctttgcttgcccaccagtgcacagaacagtaacataattgaaataattcatgactgtttgacaaagacctcagagaaaaatgtgtgttaaagaagagatggcttattcttcaatttattttcatgttccctgttctctttagggcgtggaatccagtactgatcatctcanatgttttcttctctgcacccatgagtcccttgctttatatcttacttttctttaggaagcttagcctcatcagaacactgtctcttttcctgttgttgcttgaaattcatacctccctactcatttgcctaaaatcttagtttcatcttggtcagtcacctctcccatttctcccaggtagtcagcaggctaagtagtgactcagccccctctctgtcactctcccaggagacaaccttatattctgtcttgtcagaaagattgagactctcagctatgtctccctcattgtctcaccaacccttctagaaacttgtctacatctattcc

SEQ ID NO: 3270 - DNA, 661 bp, Homo sapiens
  B1
  misc_feature [331]..[331]: Chromosome 7, SNP identification no. = rs13239022
  misc_feature [331]..[331]: allele = a, in linkage disequilibrium with rs17150810, respectively
  misc_feature [331]..[331]: n is a, t, c or g
gaaaatcattttggttgaaatcactagtgactaataggaactgtatagctcaacaatagattattctaatgtatttttgtaatagaacccattttgttagaaaaaaattcatagccatgcttctatgtcattttttcttccaagacgtcaaactatttagcaggtaaatactgcacaatttagttgaattggattttcagtctgtttttagttcatctccagagtaggactaactgccagacctaacgttcactcctgtgccacagtgcttaacatagagcctggtgtgatgcattctaggtgctcagtacacatttgttgagctctctgntcctgtcccaagggcaactggcatttcttcagtgagtttctgaaggtatgccttctgtttctgccagtaatttccctgggaccaggaaattattttgctaatgagatatgcactttacaacttgcatgcctatgcttatcattcctattcctggagttcagcagtcattgcagctgctgtggaaagtactcctttgctttgactgtgttttaactatcaagttgttttgggactcccagttttgtcactatggaatttttaagatccttttttgcttaaaaagcaattgtcatcttggaagaagaataggtctcatcatctttctggtgt

SEQ ID NO: 3271 - DNA, 661 bp, Homo sapiens
  B1
  misc_feature [331]..[331]: Chromosome 7, SNP identification no. = rs17170220
  misc_feature [331]..[331]: allele = c, in linkage disequilibrium with rs17150810, respectively
  misc_feature [331]..[331]: n is a, t, c or g
aaaaatccttgcagtctcactcctactgtcagctgttttaactatcagttttatttaggtggagaaaccactgggaccatgaatgataatttaattaacattcctttattaagacaggctgagtttaattttttcttttgactattctttttaaataaagattattttcttaagataggtttctacaatggtaattacaaagtcaaagaataggagtattttaaggccttaatataaattagctgattattactaattttatgagttgatgcggcatagaaaatgtgcaggcgattctttaagtattccctcacactgtcttcattagtangtacatcaatatcactgttttcagagcatcttatggggtttgccaacagaatgtgccttccttcatggtcttgtcttacaagaccacctagcacagctggagagagccaacagttgcgtgtaaaaaaaaaacagaatgtggatatgaggagctaaagacagggactggctattggccccttgtttatagtgaattaaagccagaccaggccgggcgcagtggctcacgcctgtaatcccagcattttgggaggccgaggcaggcagatcacctgaggtcaggagtttgagaccagcctgaccaacatggaaaaaccccatttctactaaa

SEQ ID NO: 3272 - DNA, 661 bp, Homo sapiens
  B1
  misc_feature [331]..[331]: Chromosome 7, SNP identification no. = rs11773450
  misc_feature [331]..[331]: allele = g, in linkage disequilibrium with rs17150810, respectively
  misc_feature [331]..[331]: n is a, t, c or g
cccagcattttgggaggccgaggcaggcagatcacctgaggtcaggagtttgagaccagcctgaccaacatggaaaaaccccatttctactaaaaatacaaaaaaattagccgggcatggtggtgcatgcctgtaatcccagctactcaggaggctgaggcaggagaatctcttgaacctgggagtcagaggttgcggtgagctgataatgcgccattgcactccagcctggacaataaaagcaaaactccctctcaaaacaaaacaaaacaaaacaaaaaacgaaaacaaacaaaaaaccaaaaaccaaactgaagaagaacccagcttnccagaggagactgagaaggaggcagccagcacatgagtgctcctgtagtgttatcttgttttgggatttagatcagttagtagtaatttcccttcaggcctacacatatcttcatttttctaaaagaaaaaagagagaaaaggggaaatgatcaaaagggggctaaacaatgattgacttttgattagattaaatgagtttaaattctactttacaaagaaaatttttacaaaggcccctttcagaataatcagaaatactttcacattatgtacttttaaacaaagctttttaaaataattacattaaatattatcattgtagaaaatt

SEQ ID NO: 3273 - DNA, 661 bp, Homo sapiens
  B1
  misc_feature [331]..[331]: Chromosome 7, SNP identification no. = rs961679
  misc_feature [331]..[331]: allele = g, in linkage disequilibrium with rs17150810, respectively
  misc_feature [331]..[331]: n is a, t, c or g
gacagatattttcattaactagcaaatagttaacccattgtcacaatcctgaaataatgtgtgtgatgaagaataattaaggtagcaagggcaaaaggttactcaagaccttactacagtttgagcttaaattataggttttaaacaagatgtaaggaccaattcacatgaaaaaaaaaagcaattttaatggaatgcagaacaaattaactttttaacatttaatactacccaattgcataatgggattttgctaagtgctacagggagcagaaaataaaagtaacactgaaaggtatgcttgttaactacttcaagctaaaggtattantgatctactaaatgctgtagtaaatggacacattgtgacatgaaagactctgggttctgccatctgattggcatgttttgtgtgttgtttcttttttaaaaaaggaaatggatcaaaaaacttttaaggagttttgttagcatattcccagaatgtcttctcaacactacgctagactgggaaaggcttctcctgcagggttaccttcttccctattaagtcaaccagcaaggtggctacaagatgctttcaaacccagccctctccatgggggtgaagccaccacagcattcctgtctccagcgacctagggagcctgcaattcaatct

SEQ ID NO: 3274 - DNA, 661 bp, Homo sapiens
  B1
  misc_feature [331]..[331]: Chromosome 7, SNP identification no. = rs17170225
  misc_feature [331]..[331]: allele = a, in linkage disequilibrium with rs17150810, respectively
  misc_feature [331]..[331]: n is a, t, c or g
aatgggttaactatttgctagttaatgaaaatatctgtcacttaagaaatatatggacttgaagttttaattaaaattgtatatcaataatgaaataaaatgtaccttttttgatgaaaatatattttaaaatattgctttctttctttttgaaataaccattccttggttaaggccaaatgattgattaagctgttgatggaaatggggagcttgtttccattttaaagtattaaaacatttgctttttaaatgtaatggttttctaattacattcattgtcaccttatataaatatgcttagagattgtcttataataataaaatgtcntggaaccagatcctaatggtggtgtggcaaaaatgcctcatatttcttgattccaaatatattagataactttttttgtatttttcaaacttatagtgaataaataataagtaggaaatgaaatttcctgaaactaagctaaatatcttaagagcatttggtgctttgtttggcctgtttttatttgataatctgtatacttcattaaaaatcatcaggttcagagagattactgataattgcaaacttaattcttagcagtagagactgtctggcatacaaagcccttaaaattaccttgaattttttttagcctagagagtttacatc

SEQ ID NO: 3275 - DNA, 661 bp, Homo sapiens
  B1
  misc_feature [331]..[331]: Chromosome 7, SNP identification no. = rs6965729
  misc_feature [331]..[331]: allele = a, in linkage disequilibrium with rs17150810, respectively
  misc_feature [331]..[331]: n is a, t, c or g
ttcttgattccaaatatattagataactttttttgtatttttcaaacttatagtgaataaataataagtaggaaatgaaatttcctgaaactaagctaaatatcttaagagcatttggtgctttgtttggcctgtttttatttgataatctgtatacttcattaaaaatcatcaggttcagagagattactgataattgcaaacttaattcttagcagtagagactgtctggcatacaaagcccttaaaattaccttgaattttttttagcctagagagtttacatctttatgtcacatcaaagagaaaaaagaaaacaaaaaattggtgntggtgggggcagatggtggaagaaagatatgaacagatcctgagaataatggagtttttaatttgaagaagttttggaaattaggttcagttacctcatttcacaggagaataaaaagaagcctcaaatattcaatgacctgcccaaagttctgcgttattaataactgagatgggacaagaaccagggtttctgagacaatttgttggttttgaaagagattttggggtcagacaaatctggttttcaaccctgactacctttgtaagctctggcagattattgaagtgctctgaacctcatttttatcttctgtaaaatggggatgat

SEQ ID NO: 3276 - DNA, 661 bp, Homo sapiens
  B1
  misc_feature [331]..[331]: Chromosome 7, SNP identification no. = rs6966188
  misc_feature [331]..[331]: allele = a, in linkage disequilibrium with rs17150810, respectively
  misc_feature [331]..[331]: n is a, t, c or g
ccttaaaattaccttgaattttttttagcctagagagtttacatctttatgtcacatcaaagagaaaaaagaaaacaaaaaattggtggtggtgggggcagatggtggaagaaagatatgaacagatcctgagaataatggagtttttaatttgaagaagttttggaaattaggttcagttacctcatttcacaggagaataaaaagaagcctcaaatattcaatgacctgcccaaagttctgcgttattaataactgagatgggacaagaaccagggtttctgagacaatttgttggttttgaaagagattttggggtcagacaaatctngttttcaaccctgactacctttgtaagctctggcagattattgaagtgctctgaacctcatttttatcttctgtaaaatggggatgatattccattgtgtgatttcatgagataatggatttgaagactgagcttcggttctgacccttccaaatggcttatcagtgctggctcccttccctttgctaggtcagtgtcttctctacaacacagtgttgtgtattgtagcaagtcacttatgccaaacaagaccctgactattttggcaatgaggtctgggtttgctgcctgaccagcaccagacacggggacactagtatgcacctggct

SEQ ID NO: 3277 - DNA, 661 bp, Homo sapiens
  B1
  misc_feature [331]..[331]: Chromosome 7, SNP identification no. = rs17170226
  misc_feature [331]..[331]: allele = t, in linkage disequilibrium with rs17150810, respectively
  misc_feature [331]..[331]: n is a, t, c or g
aatggggatgatattccattgtgtgatttcatgagataatggatttgaagactgagcttcggttctgacccttccaaatggcttatcagtgctggctcccttccctttgctaggtcagtgtcttctctacaacacagtgttgtgtattgtagcaagtcacttatgccaaacaagaccctgactattttggcaatgaggtctgggtttgctgcctgaccagcaccagacacggggacactagtatgcacctggcttatgatgatactgttacgaggtttgggcaggaatccatgctgaagccatgcagcaggtgctttggttctgtggcctngggactcctgcatttccctactcttgtttgatagcatagccgagaaatccacagagacagagatgatgctgaggagcccactgcttttttttcttggaaaagaaatgttccatggaaacttttcctgtgaaccctctttgagagatttatgcagattataaagtcaaaagaagcggtcattccagacttttctttccaggcagacaggccaaaacataattttagcaggtattagtaaaaattgagaagtattttgtgtatgctgggattcttgccaggctctgtgtttgcaactcccaagacattgctaaggtgaaagtttttcttcac

SEQ ID NO: 3278 - DNA, 661 bp, Homo sapiens
  B1
  misc_feature [331]..[331]: Chromosome 7, SNP identification no. = rs13236885
  misc_feature [331]..[331]: allele = c, in linkage disequilibrium with rs17150810, respectively
  misc_feature [331]..[331]: n is a, t, c or g
tcacttatgccaaacaagaccctgactattttggcaatgaggtctgggtttgctgcctgaccagcaccagacacggggacactagtatgcacctggcttatgatgatactgttacgaggtttgggcaggaatccatgctgaagccatgcagcaggtgctttggttctgtggcctcgggactcctgcatttccctactcttgtttgatagcatagccgagaaatccacagagacagagatgatgctgaggagcccactgcttttttttcttggaaaagaaatgttccatggaaacttttcctgtgaaccctctttgagagatttatgcagantataaagtcaaaagaagcggtcattccagacttttctttccaggcagacaggccaaaacataattttagcaggtattagtaaaaattgagaagtattttgtgtatgctgggattcttgccaggctctgtgtttgcaactcccaagacattgctaaggtgaaagtttttcttcactacccttggaagattgttgaaacaagccggccactattcttttccattgcatccgtatcatcgaggcctctctagacactgttttgtggcatcttgggccaacacaaattgatttgcttttcagcgaaagaacttcatgcagaatgttgactgcag

SEQ ID NO: 3279 - DNA, 661 bp, Homo sapiens
  B1
  misc_feature [331]..[331]: Chromosome 7, SNP identification no. = rs9639675
  misc_feature [331]..[331]: allele = a, in linkage disequilibrium with rs17150810, respectively
  misc_feature [331]..[331]: n is a, t, c or g
ggagtaaaatattggcatgaagagaacggaaacattgcatgtaggaaaatgtacgggagtagaattagagaaggaaaaatcactagtcatgacccgatgttactacagccacaccagcttacttataataggaattcagtgtgttacaacaaagagggttctgtaaatgcaccatgataaaaatggcaaatacttataatagctgctattttttgagcacttactgagtgccagctattgctaagcactttacctacattatctcaattattttaaagggttctgttgtacagagggactctgtaatgttttgccttcaataacttaatgnttttaaagagcatttctttatgtaaacacttccccgtggatttgggattctaggaaataaatgggaaaatattagctaaccttgtacaagagagaatgatggtgttgggcatatgctataaactctccccagatttcccaaactgtgatccaaggaatattcttctgggagatattaatagatgttctgtaaaaaatgggttttgaagcactgcattctgtgtccttctgctggggattcactaagccacattcggttgttaaaggatctgagaagttctgctttaaaaaaaaaaacggagttttttaaaaaactatgtttactatttcc

SEQ ID NO: 3280 - DNA, 661 bp, Homo sapiens
  B1
  misc_feature [331]..[331]: Chromosome 7, SNP identification no. = rs17170229
  misc_feature [331]..[331]: allele = t, in linkage disequilibrium with rs17150810, respectively
  misc_feature [331]..[331]: n is a, t, c or g
attattatccttattttatgcatgaggaaactgataaccagagaggaagtgatcacccccaggccaggtaattagagctgtgatttaaatacacgtatgtatgtatgacttcaatatccagttttctctgttcccctccaccgtctgccaaattaaagttttatggcattatttggcttgagctgagggtgaccatgtagttataatccaaactagacattttggagaggaaaggggaacaatattaataattgcaccagaacaacaggtatagtccagactgtcatagaaaaacagggtgtgtgttcattctactgtgcaaatgaaatanccaagtaaatagtaggatagattttagtcacatttgtgcaattgatttttgacaggtgtggttctaggatattatctcccattgagtcaatatgccgaattcaaatagttttaaatattttattgtgcttttaaaagtattttattgccaaggtagacccacccttattgacagttccaatatagataaaatggattactgcacatccttttctcacacctcagtgttttatgggtttccagaacttagtgcagtccaaagtaaagggagtatttatgacattttaaaaagcaaaacaggagataattattcttttctctcttcctccac

SEQ ID NO: 3281 - DNA, 661 bp, Homo sapiens
  B1
  misc_feature [331]..[331]: Chromosome 7, SNP identification no. = rs13234403
  misc_feature [331]..[331]: allele = c, in linkage disequilibrium with rs17150810, respectively
  misc_feature [331]..[331]: n is a, t, c or g
atagagaagcatcagagtgttatctgtcagacacatttccaattctgaggggaaaattcttttgaatttcacataaattctttacctggaaatacagattgatttatattgaagattactactacacaagaagtcatagcttcttagataactgtgtatatgtccagcatatctttaagaacagtttttgggcagtgcctcatgcctgtaatcccagcactttgggatgccgaggtgggcggatcacctgaggtcaggagtttgagaccagcctggccaacatggtgaaactccgtctctactaaaaataaaaaaaaattagccggacacngtgttgcatacctgtaatcccagctactcaagaggccgaggcaggagaattgcttgaacccgggaggcagaggttgcactgagccaagatcctgccactgcactccagcctgggcaacagagtgagactccgttgcaaaaacaaaacaaataaaaaccccacagcttttgtacagctgttttgaacagcttttgcaactttttcaacatttttgctggacatggtgttaagttttgaaatatagaaatgaaaaacacataggctctctttcgtaattctaactcactgtcaacaaaatgcagaaaagcatattgtaacacctggtgataa

SEQ ID NO: 3282 - DNA, 661 bp, Homo sapiens
  B1
  misc_feature [331]..[331]: Chromosome 7, SNP identification no. = rs12056267
  misc_feature [331]..[331]: allele = a, in linkage disequilibrium with rs17150810, respectively
  misc_feature [331]..[331]: n is a, t, c or g
cataaagagaaatctggaaaagttaattccttcatattctgagacgtagctagtggaggactaattttgtcactgggattctcttaaatccagatatgctgtctttcatgcccttcactcccaccgggaaacccctatatttttcttccctatggactccatgctttaaaaattgtctctcaaggacaatatatcaattgtacatgcttttattaatactgcatagaactgcatgtaaaattgtttgatcagtgtgaaataattgctacaaagagacttgacattttgctttactttggaatccctattacacataagcgtgcagtttttntaataaaaaagatgaaaataacttgttgatcttctattgtacctgtaagaagttcatcttggcattctcttgtagtcttagcaagcatggatttgtaatcacgccaaaatgggttacatatgacaccagaccccttctgtgtgaccatgaattataacttttaaaaaattactttacttgagacaagtttaaggcaataaagtgaatgcctgagaaaagaagtcatcagtgggagtttatgagttaccgaaacagggagctcaaactgtgctcaccacagtagaatagttttaaaaatcagtgaaggtgtttgaattgatgagctgtttg

SEQ ID NO: 3283 - DNA, 661 bp, Homo sapiens
  B1
  misc_feature [331]..[331]: Chromosome 7, SNP identification no. = rs17170246
  misc_feature [331]..[331]: allele = c, in linkage disequilibrium with rs17150810, respectively
  misc_feature [331]..[331]: n is a, t, c or g
ttgaggggaagtgagtggagaaaggagaggaagaagaagaggaacaaggctgtacaataagttacatccctaggtcacattttaaattttgatggaaccggtctctcttggagaatctgtgtaaggacctacatcctgtaggaggaagcagagcctgggttttcaggcctttaagcattgactaactgctgaatgcaaatgctagcggagattgaactgtgctaatattcctattagaactgttattattttagctaatgctctgattacagaattgcataagttttgagtgctctgctcataatcccttttccctcataagccctgttantttcatagcaattttgcaaaacatgaagttttgcaggaacacatgtattgcatttatgtcagaaatgccagtacatcatggtaaatatctacttagtaaactacttgtatgttgatgcataaagttaaattttataataagacctcagtgaccagattgagaaattgaggtataaaaagtttgtgttgtcctccattagttggaatgttctctgtttattaaactgcttatcacattgttgaaactattttaatccatctaaatgatattgatatggtttggctgtgtctccgcccaaatctcatcttgaattgtaatccccataatccc

SEQ ID NO: 3284 - DNA, 661 bp, Homo sapiens
  B1
  misc_feature [331]..[331]: Chromosome 7, SNP identification no. = rs17170247
  misc_feature [331]..[331]: allele = g, in linkage disequilibrium with rs17150810, respectively
  misc_feature [331]..[331]: n is a, t, c or g
ttgcatatagaagttttagatctgatttaatgcttgttaggttagtcatccaactgtttccaaaaagactttttaaaatacgtatctgctactagaaatatttagtgttgatttagagaagtttactatcagggtgttaaatatttatttgatgcctgcggaatgattaggttaatgatctgagaaggctgctatgggtcgtgtatctgttacagaattcctgtgattttaaaatcacacaaatgctgacttttgatggcttttgcccttggtatatagcaggttatttttggaaagttccaaacaattaaagaattagagctgatttcantgaataaggaaagatggatatatgttgttcaggttctgtgggttgcctacatgttatctaatttcattactagcaggactccacttttgtttgagaagtagggaggctagtggagaggggattgggtgagcaaaagttttactgatacctagtttgtaaaaaaacaaaacaaaaacacccaatctattttctaggctctttttcagcttagagtggatgtgttccgcagttctggccagtaagttggaagttgaaggcttcctgccttctttgatgttctgccactctgattcttggccgctagttttccggactctgcttgtcctgata

SEQ ID NO: 3285 - DNA, 661 bp, Homo sapiens
  B1
  misc_feature [331]..[331]: Chromosome 7, SNP identification no. = rs1419923
  misc_feature [331]..[331]: allele = a, in linkage disequilibrium with rs17150810, respectively
  misc_feature [331]..[331]: n is a, t, c or g
tttgagtttaactgcaaaatgcaggtaataatacctactcttgtcctctgggaggaaatgagtcaatatatgtaaagcacttagaaaaaattgatacaaattaagtgctcactaaatgttaactatttttcttattatgtgccagggccttcatgccagggcctatgtcaaatactagggagacagcagtgaatgagaccaacatggttactgctcagggaacatttagatttgcagatttggcaccagttctgatactttatgaataaactgtctcagattcctattctttagaaaggaaaaaacaatcctattcaatgcttgttgttgntttagcataatcatcattaacatatcatttcaatggtactgaatgcttacattacaggtattgggccaattgcttcacaagctttacctcatttaattctcacatcaaagtcctgagctatactatcatcctcttttacagttcaagaaactgaggaacagggagattaagtataataagattcaaatccaggtctgtctgactttgttctggagtcctaccccatgccgccttcagaatagtaaatgagagcccttgaagtggaaaactgccaaggcaaagggaatgcactcagactacatcacagacaggaaaagacacgatctggaa

SEQ ID NO: 3286 - DNA, 661 bp, Homo sapiens
  B1
  misc_feature [331]..[331]: Chromosome 7, SNP identification no. = rs1419922
  misc_feature [331]..[331]: allele = a, in linkage disequilibrium with rs17150810, respectively
  misc_feature [331]..[331]: n is a, t, c or g
gagtttcctcagaaaactaacaatagaactacaacatgatctagcaatcccacctctgggtatatatccaaaagaatcaaaaacaagatctcaaagagatattggcacattcatgttcattgcggcattattcgcaattgccaaggggaagaagcaacataaatgtccatccaaagatgaataaagaaactagggtatggcatatatatgaatatcattcagcctttaaaaagaaagaaatcctgtcatgtgttatacagcatagacgaatactgaggaccttatgctaagagaaataaaccagtcacaaaaagacatgattccactgcangattctacttatgaggtatctaaagtggtcaaaatgaaagaaatagaaagtagaatggtggttgtcaggggccgacctgacagggagtgggaggtagagagttgttgtttaatgtatgtagggtttcagtcatgtggggaatgggtgggtctgagatctgttgcacaacaatgtatatgtggtggacaatattgtactatacacttggaaacaggaaggtgaattttatgtcgtgtgtgtcttttttaatatctttatgcgtttgtttgccacaataaaaagggagggcgggatggaagagtatctctgttattggccaagaatgataca

SEQ ID NO: 3287 - DNA, 661 bp, Homo sapiens
  POU6F2
  misc_feature [331]..[331]: Chromosome 7, SNP identification no. = rs17712902
  misc_feature [331]..[331]: allele = c, in linkage disequilibrium with rs17770077, respectively
  misc_feature [331]..[331]: n is a, t, c or g
gagagcacaatatttattcagccactttcattatccttgaggtaaggagaaagctccccatgctccacctctggaagtgaggaagacacagatttttcaaaaattctgtgtctatcctctttgtcaaggtctgagttctggaactgtctagctggttttcagtaacctcctctgtaaatccagcacatagtctagtccctcccctggaatgcagcaccagttgggtcttggtgcccccatggaaacttccaatgtagcattctattataaaacagggaagattaaattatatttcataataagttattatcttctattcatcatggtaaanaatttccactttaaaaaatataacattcagaagaattcaaaagagcttttgcaatttagtgtaaatgcccaggagttaccacacaagcatgtaaataaaattaagctacgaatgaccatttattattgaacacttatttggctggtaaaccacagtgttgagtgctttgcatagattatcttagttctcacagtaaccttatgaagtggacattactattcctattttacaggtgagtagactgagatcctaagaggtaaagtaattcaccaatgatctcctactagttggtggcaaagcctggccttaaatccagccagtggggaattt

SEQ ID NO: 3288 - DNA, 661 bp, Homo sapiens
  POU6F2
  misc_feature [331]..[331]: Chromosome 7, SNP identification no. = rs17713125
  misc_feature [331]..[331]: allele = t, in linkage disequilibrium with rs17770077, respectively
  misc_feature [331]..[331]: n is a, t, c or g
gaaaatttttaaacaaggaatacaccacactgaaggtgtgtgtggtaggatagttcccttcccccacctgtctcccccaaagccagttttttaatggacttaaagcaaaccaaataaccacgtacttttttctgtatattatgaaaatgtgaacacattttaaggaaaaagaaaaaaaaaaactaaaccaaaaaccaacaacgaaggaacaaaaactttgatctgttcaaagcgaatacaagcctgccacctggaggaaggactgcaccccttcaggtactaagtgctgattcactatgaaacctattaaccaaagtcagaaacatggcantgcaacgcgatcgttcgtctacgcttctccgcacgtaaagttgtgttacgaatttttacatttgtactaacagaacaataggaagcctgatttctcccatctttcccatctactgtctccacccatggggtgggtaccattgttgaagccattctgtgaggctcactattgggtttttttgtgggggtggtagggagggtggtcttttttctttgtctttctttttgacgggagggcatcctggatcgtgtgccaaagcatttgttgcttttttctcactatgacttgtgggtttgagaaaagaaaatggagctcgcatttctctctttt

SEQ ID NO: 3289 - DNA, 661 bp, Homo sapiens
  misc_feature [331]..[331]: Chromosome 7, SNP identification no. = rs17713251
  misc_feature [331]..[331]: allele = c, in linkage disequilibrium with rs17770077, respectively
  misc_feature [331]..[331]: n is a, t, c or g
gctttgaatagaggggaagagtccacacaggctcttggttctgttcctgggaggtcacaatgcaaccagtccttgaaaaacataatgtgtgctcaagcacttgcatgtgtattctttatttctgcttctagaaccatcagactccccaggaggaacaaaaatcagaaaaattaatatatctgcagtctcccaagagtataagagcctgtttctccattttttctcttcagaggaagcattcaactctgaaggggtccatttaaacttcctgaagagagcaaaatacttggggacacatcagtgccacctgcccgtcccttggcaaagcaanggccccatcccttattctcctcctccaagtcctttattttctgattctctcctttaaacttactttgcccttattttcctcaaaactggaagggtgagaagcatcgtcaagttagccagacaagaccattcaatattttgtgggtgcaccccctcaacttcctcagccaggaaactctacttacattttgtgttctcttggcctgttgctcctccttttcctgacctccaaactctgatcagcctccaagatccagatgaaaggcctaagacctgaaagcataacagtgaaacactgtttagagttgaggtcaggatgaagatctatcac

SEQ ID NO: 3290 - DNA, 661 bp, Homo sapiens
  misc_feature [331]..[331]: Chromosome 7, SNP identification no. = rs11980560
  misc_feature [331]..[331]: allele = a, in linkage disequilibrium with rs17770077, respectively
  misc_feature [331]..[331]: n is a, t, c or g
acttttaattataaaagtaattaactaaaagcaatcacttgtgcaccaacataatataataactggctacattgttattattattttgaggaaattattgttagatcaattaagaataagaaaaatattttatttttccttcatttttttcattttctaatgctcttttgttacatagagtggagtttctgacctatgttatttttcttgtctctgaagaattatttcaacatttcttgcaaggcaggtctgctggtgacaaattccttaaatttttgtttgtctgagaaagtttatttcttcttcactctcaaaggataatttcactgcntcaagaattccatgttggtggttttctcttttgactcttaaaatattcatttcactctcttttcacttgcttcaattctgatgagacgtttgatataatccttatgtttgctcctctctaagtaaggtgttttttcctctggttgctttcaagattttctctcactgattttctgaagtttgaatatgattatggccacaatgtcaagggcaattgattatgcctacagatttttagtatttatcctccttatgtttgtagtttcatggatctgtggtgttctgtttgtcattaattttggaaatttttcagctattcttacttcagatt

SEQ ID NO: 3291 - DNA, 661 bp, Homo sapiens
  misc_feature [331]..[331]: Chromosome 7, SNP identification no. = rs17770077
  misc_feature [331]..[331]: allele = a, g
  misc_feature [331]..[331]: n is a, t, c or g
ctgagttcaataaatcccgtatggttgatacatataccttaatttcaaatcaaaggatgatgttgtgggataatataaggtttgaagtcagaaggcttgagttcaaatcctggctttgtcacatatgagctgtgttaccttgggcaagtatcctagctcactgagtttatttcccaatctgttaagtagagccaataaacagtagctttacagatgataaaataataaaattcacataaaatcaatatataaaaatgaagtactctcctataaatatctaattaatagaaataaggagttttcttccttattcgtaatcctctttgtaatntctctttaatctcacaaaggtagatatacggagcggcattaaatactgtcaagggatttaaacacggttcttttttcttttgttttttttttactattatactttaagttctagggtacatgtgcacagcgtgcaggctcattacataggtatacatgtgccatgctggcccactgcacccatcaaccgatcatttacattaaatatttcccccatgctatccctcccgcaagaccaccatgacaggccccagtgtgtgatgttccccaccctgtgtccaagaaacacaattcttttttcaaaaaaaaaattgcacagaatattagagct

SEQ ID NO: 3292 - DNA, 661 bp, Homo sapiens
  misc_feature [331]..[331]: Chromosome 7, SNP identification no. = rs17770101
  misc_feature [331]..[331]: allele = g, in linkage disequilibrium with rs17770077, respectively
  misc_feature [331]..[331]: n is a, t, c or g
tgagccactgcacctggcccagaatttttttttttttttttttttttttttttttttttttttttttttaccgttggcagtagcattggaataaagaggctatggtgatggacagcttggttttggtttttgttgttgttgtctgtaaatgctgacatattcgtttaggaatcagtctttttacctcacagtcccaaaatgtaccacatacaacaaaccatccttcatgtacaaagacaaaataactgctcctagacatgaacttttctaagaacagcaacaggtaacttgggataggaaagtgagtaaaagaaaggtctctttcacaggntagttattgtgttcaaatagctgagtgtccaagccagcaagagagagtttcaaggaaaaacatcagaataaataacatgggcatgtatgcaatgaaccaaaaggatctacacaaagaggaagacaaactggacttgcaagacaaaattttaagaagagacaaccataggcataggatggcaaggagaggaaagaaatggagcaatcaaaatgagtcaacacaaaatctacaaagaaaagcagaattatagatcttacggctgaaaaaaacacaaccccctagggccatagaaagcccctggtgaaggcggtactgctcactgcactaaac

SEQ ID NO: 3293 - DNA, 661 bp, Homo sapiens
  misc_feature [331]..[331]: Chromosome 7, SNP identification no. = rs17713347
  misc_feature [331]..[331]: allele = c, in linkage disequilibrium with rs17770077, respectively
  misc_feature [331]..[331]: n is a, t, c or g
ggctatggtgatggacagcttggttttggtttttgttgttgttgtctgtaaatgctgacatattcgtttaggaatcagtctttttacctcacagtcccaaaatgtaccacatacaacaaaccatccttcatgtacaaagacaaaataactgctcctagacatgaacttttctaagaacagcaacaggtaacttgggataggaaagtgagtaaaagaaaggtctctttcacagggtagttattgtgttcaaatagctgagtgtccaagccagcaagagagagtttcaaggaaaaacatcagaataaataacatgggcatgtatgcaatgaancaaaaggatctacacaaagaggaagacaaactggacttgcaagacaaaattttaagaagagacaaccataggcataggatggcaaggagaggaaagaaatggagcaatcaaaatgagtcaacacaaaatctacaaagaaaagcagaattatagatcttacggctgaaaaaaacacaaccccctagggccatagaaagcccctggtgaaggcggtactgctcactgcactaaacccttccatttttcatctgtttggctctgaacacccagaaaaggcctctatctacaaacctctccacactccccagtgttagaattggatccttagag

SEQ ID NO: 3294 - DNA, 661 bp, Homo sapiens
  misc_feature [331]..[331]: Chromosome 7, SNP identification no. = rs17770131
  misc_feature [331]..[331]: allele = c, in linkage disequilibrium with rs17770077, respectively
  misc_feature [331]..[331]: n is a, t, c or g
caaggaaaaacatcagaataaataacatgggcatgtatgcaatgaaccaaaaggatctacacaaagaggaagacaaactggacttgcaagacaaaattttaagaagagacaaccataggcataggatggcaaggagaggaaagaaatggagcaatcaaaatgagtcaacacaaaatctacaaagaaaagcagaattatagatcttacggctgaaaaaaacacaaccccctagggccatagaaagcccctggtgaaggcggtactgctcactgcactaaacccttccatttttcatctgtttggctctgaacacccagaaaaggcctctatntacaaacctctccacactccccagtgttagaattggatccttagagctgaaaagtttccctgggtctgacaaggctcattatcccttgctgtacttttaaccacagtcaataacgtgtccctttcccttccgttattattcctcagtatttatagatgcatcaatggtttcttcccttcaaaatgtgcatattcaattccctcgatcccagctgccttcaaaatgtatgattttgaaaagtgtgggaaggagagagaaacaaaggttatctttatgaaactttgcatatccccagccatcaatgtctcctcaataatgagaaaggccaac

SEQ ID NO: 3295 - DNA, 661 bp, Homo sapiens
  misc_feature [331]..[331]: Chromosome 7, SNP identification no. = rs10486688
  misc_feature [331]..[331]: allele = g, in linkage disequilibrium with rs17770077, respectively
  misc_feature [331]..[331]: n is a, t, c or g
gaacacacaatgagagcagaactctgtggagcagcagtgcaggtagagttgctttatgtctcaaattgttagtcacagacgtttctagtctgggctgtggtttccttggctgtaccggtgccctcaaagcttactaggctttttaaaaatctagttcaggagtcagcaaactacagcgggtgtgccaaatccaggccgacacttatttttgtaaataaagtttttattgcaacacagagatgtccatttctcacatgttgatttatgtcagttccatgttgccatacccacgattcctttctagacacatttcttagattttccataatcntttgcattattgtgcctatgccagctctttctttcttactgcagttgtccagtatcttgagcgtgtcaggtttagatggaagtgtcagaatctacctcccaccaagacctaaacagtgaggagaaattcctcaaagaggaaaaatttctgaattggagtgtcaagaaatgacaaatatccactactgagggctgaggtggacttttcagagccctggagctttggaagaggcagcacggagtagtgggagttaggaggtctgtctcttcatgcacaccgtcttactaacgggctggggaccttcgtggtcactcagccttctggagcttc

SEQ ID NO: 3296 - DNA, 661 bp, Homo sapiens
  misc_feature [331]..[331]: Chromosome 7, SNP identification no. = rs11982079
  misc_feature [331]..[331]: allele = a, in linkage disequilibrium with rs17770077, respectively
  misc_feature [331]..[331]: n is a, t, c or g
cacgctcaagatactggacaactgcagtaagaaagaaagagctggcataggcacaataatgcaaaggattatggaaaatctaagaaatgtgtctagaaaggaatcgtgggtatggcaacatggaactgacataaatcaacatgtgagaaatggacatctctgtgttgcaataaaaactttatttacaaaaataagtgtcggcctggatttggcacacccgctgtagtttgctgactcctgaactagatttttaaaaagcctagtaagctttgagggcaccggtacagccaaggaaaccacagcccagactagaaacgtctgtgactaacantttgagacataaagcaactctacctgcactgctgctccacagagttctgctctcattgtgtgttctctccctggtgagcttcatcaaagctcctttggttgcaagaaacagaacccacttgagctcgattggatgcaaaaaggaagaattaattacaaggacacaggggaatgccccagagctcaagagctaaagggagttaggatcttcatacatttctcactccctctcccctggccctatctctccctccccttctctctgcacatgctgattcagttctgcctctatgcaacagctttctttgcccttatgtgaatattatggacc

SEQ ID NO: 3297 - DNA, 661 bp, Homo sapiens
  misc_feature [331]..[331]: Chromosome 7, SNP identification no. = rs17713407
  misc_feature [331]..[331]: allele = g, in linkage disequilibrium with rs17770077, respectively
  misc_feature [331]..[331]: n is a, t, c or g
tttatgaatgacctagtctctggtatttgattatagcagcacaaacagagtaagacaatagctaaaataatattcacccagggacttcatttagttctatgaatatgaatacaagagatacagcctggtcttcagtgcagaaccccagactcttgggaaggaagaaaagctcactcagatctggactatgtctacatcaatacttcacaatattttaaaatcatatacccaccaggaaaaatcttacttgccacagtcctccggcataagggttgagggttgggagggaacggtctgccagggggcagtgggctgggctttgaaaagttantgaaggaagaagaaggaacaaagaaaatggaagaaacagcaggcttcacaaacacaaaaccaagccaccatggcagctttagtttgggaggaggctgaagtctaactcaggaaggaagaagtggtgccacccattgaaatctcgtctgaatatctttgccagtggactgttgcatcaaaatgccctcccagagaataactttccctggcgtataggtaagatgaactagagttcctcttatgtcacatcaaaaaaaaaaacttagattggtatggaaaggcaataaacttaaaagcagtgtatctgttatgtttttctcccaagattgac

SEQ ID NO: 3298 - DNA, 661 bp, Homo sapiens
  misc_feature [331]..[331]: Chromosome 7, SNP identification no. = rs4273762
  misc_feature [331]..[331]: allele = c, in linkage disequilibrium with rs17770077, respectively
  misc_feature [331]..[331]: n is a, t, c or g
cctgcttgcaagggaaattaggaaatgctcccagttctcaccaccccactggctcatgcccatgttttccgttatctatgttctgtcatagatggaatgtgcttgttttatccatactttcctaaccctacgttccttgaagtaggggctttgtcatatccagcacagcttaagaatgcttattgggttcacaacaatcagaatggatccaaaagtgtctctgagaaaacagaaacaagaaaaagaacaacatttattgaaattcaaaggcaaaagcctctctttagaaaacgcttccccattttctcatgtttggtgggtagaacaaganggcatcacttgaaaacattggccataactgaacaatatattacagatttgtttaatattggcagttctttaaaaatgttcctttgaacagaatctcagcaaagcgaagctttccctcccagcactgctttaaaagttaggaggcagctttctgcccattccaaatcaccaaaagtaaagtatcaagtcataaatgccccccagtgactgactgagctagccaggctgtttttttcccttctacttcgcggaaagaaaagacagtaaaagttccttcagcaagctgccaaggtgctcccaggccattgtgcagaatcattgtcaggttaaa

SEQ ID NO: 3299 - DNA, 661 bp, Homo sapiens
  misc_feature [331]..[331]: Chromosome 7, SNP identification no. = rs2876841
  misc_feature [331]..[331]: allele = g, in linkage disequilibrium with rs17770077, respectively
  misc_feature [331]..[331]: n is a, t, c or g
ggaaatgctcccagttctcaccaccccactggctcatgcccatgttttccgttatctatgttctgtcatagatggaatgtgcttgttttatccatactttcctaaccctacgttccttgaagtaggggctttgtcatatccagcacagcttaagaatgcttattgggttcacaacaatcagaatggatccaaaagtgtctctgagaaaacagaaacaagaaaaagaacaacatttattgaaattcaaaggcaaaagcctctctttagaaaacgcttccccattttctcatgtttggtgggtagaacaagacggcatcacttgaaaacattngccataactgaacaatatattacagatttgtttaatattggcagttctttaaaaatgttcctttgaacagaatctcagcaaagcgaagctttccctcccagcactgctttaaaagttaggaggcagctttctgcccattccaaatcaccaaaagtaaagtatcaagtcataaatgccccccagtgactgactgagctagccaggctgtttttttcccttctacttcgcggaaagaaaagacagtaaaagttccttcagcaagctgccaaggtgctcccaggccattgtgcagaatcattgtcaggttaaattagggagtacagactccat

SEQ ID NO: 3300 - DNA, 661 bp, Homo sapiens
  misc_feature [331]..[331]: Chromosome 7, SNP identification no. = rs17687569
  misc_feature [331]..[331]: allele = c, in linkage disequilibrium with rs17770077, respectively
  misc_feature [331]..[331]: n is a, t, c or g
tctcagcaaagcgaagctttccctcccagcactgctttaaaagttaggaggcagctttctgcccattccaaatcaccaaaagtaaagtatcaagtcataaatgccccccagtgactgactgagctagccaggctgtttttttcccttctacttcgcggaaagaaaagacagtaaaagttccttcagcaagctgccaaggtgctcccaggccattgtgcagaatcattgtcaggttaaattagggagtacagactccatgagtgtaaaaaaatcaatacttgatggaagattgctccccggaaaatctgttttgattccaggattaattcgngaccaaaggcttctgcaaaatgacatgccattagtcagaaaatgaacacattctatccttgaaattggatggaaatatgtcagctgattgacccattctttctcttcactctctgggcagaaagagtgggtgtggtagctgtgtgaattagtgccccaaacctggtccattttcaaaacaggataaaaaatatatttttttaaagtccaatgtgaattgtgagtagtctctaggccattgttggagagctattgcaaatgtgtttcatcaaggcaaatgcatttgtctggaaggcccaactctcctgagttttctatgcctcagaatcaa

SEQ ID NO: 3301 - DNA, 661 bp, Homo sapiens
  misc_feature [331]..[331]: Chromosome 7, SNP identification no. = rs17620556
  misc_feature [331]..[331]: allele = t, in linkage disequilibrium with rs17770077, respectively
  misc_feature [331]..[331]: n is a, t, c or g
gctgggtgcagtggctcacacctgtaatcccaatacgctgggaggccaaagtgagaggatcacttgaacccaggagttcaagaccagcctggccaacatagcgagacccttgtctctacaaaaaaaagtgtaattagcagatgtggtggtgtgctagttactcaggaggctaaggagggaggatcacttgagcccaggaggtcaaggctgcagtgagctgtgattgtgccactgtactccagcctgggcgacagggtgagacctgtctcaaagaaaaaaagaggaagacagatcacctgtctgacatttctacttcatactttgtaatatncaacaaacattctatattggaactggagtcatctacagactttaaaagaaaggaggcaagtctgctcagaatcaacctactattcttattccaaggtcctctcttagaagctgttttttgaataatttcccatctattttcaccaccagcaagaattttattttttctaatacatattacacagtcttgcaaacctgatataagtaattaaaagacagcaaccaaggagttagttgctgaatgccactaaggatagaacatacgaaagtttagaagggacaaggaaaagtgggaaaatgacttcacttggcatatggaaatcagtcctgc

SEQ ID NO: 3302 - DNA, 661 bp, Homo sapiens
  PKD1L1
  misc_feature [331]..[331]: Chromosome 7, SNP identification no. = rs6972918
  misc_feature [331]..[331]: allele = c, in linkage disequilibrium with rs17131904, respectively
  misc_feature [331]..[331]: n is a, t, c or g
tgcatactgaagaaattaatgcatcctgtattcgtgaccattggttgcaggaggcagttttgtcctccttagacaaacgactcaggattctggtgatcacagtgatgtagttcctgatttctgtgtaactccccatcagctggagggtagaaaggtttttcaggctggaattatacctgaaggaaacacaagagttatcattactgttccaacacacggcaaaacttttcaccctgactaccaagagtgggatgggatttgttgcaaaaatacctcttggacagggcagggtagaaagagaatgatacaaaggagaattggtctgtgcaanggaaactctaaaaagacactgtaagtcataatataaaattttacaaaaactccttttatcagaactaaaaaaggcacaagaaaccagatactaatatagaagcatcatggcaaatgaaggaatgtattccagagccagacagagataccaccacgctacagctggccggagtttatgactccgggtttcaataattgcgcatttatttacttatttacaaacagcatacttacttgcactggaaaagataacacagtattgtgaaaagaggcctatacatgaggtcaaaggccagtttcagcccttgttctgcaatttatttgctgtatg

SEQ ID NO: 3303 - DNA, 661 bp, Homo sapiens
  PKD1L1
  misc_feature [331]..[331]: Chromosome 7, SNP identification no. = rs2167877
  misc_feature [331]..[331]: allele = t, in linkage disequilibrium with rs17131904, respectively
  misc_feature [331]..[331]: n is a, t, c or g
tctgtaaagtatatttcccctcgttgtgcagccagtgatgtttctgctcagatttatttgttctttttatctttaacttggcttcctagggtcttagtctccataaatcacttattggtcaagggtgaacttaagcatcgtgtatagagcccatgatgcattttctaatcaattagaacatgatttctaattaatttacttcttgcaatgacccactgcggtgtgtccagatgaaaatttctattttatacatttggaaactgaggatcatttttctcttaaacaatactcttgtgctcatacagcaaataaattgcagaacaagggctgnaactggcctttgacctcatgtataggcctcttttcacaatactgtgttatcttttccagtgcaagtaagtatgctgtttgtaaataagtaaataaatgcgcaattattgaaacccggagtcataaactccggccagctgtagcgtggtggtatctctgtctggctctggaatacattccttcatttgccatgatgcttctatattagtatctggtttcttgtgccttttttagttctgataaaaggagtttttgtaaaattttatattatgacttacagtgtctttttagagtttccgttgcacagaccaattctcctttgtatcattct

SEQ ID NO: 3304 - DNA, 661 bp, Homo sapiens
  PKD1L1
  misc_feature [331]..[331]: Chromosome 7, SNP identification no. = rs10951933
  misc_feature [331]..[331]: allele = g, in linkage disequilibrium with rs17131904, respectively
  misc_feature [331]..[331]: n is a, t, c or g
agtgatttatggagactaagaccctaggaagccaagttaaagataaaaagaacaaataaatctgagcagaaacatcactggctgcacaacgaggggaaatatactttacagaattcgtcttgccaaactaataaacatataaaccaatgaccaaacaaacaaaaacaacgacaacaagccaggaaaaggaggtaggccaatacccagagtggctgcaatatattatctaaaatgtccagttatcaatgaaaaattatgagacatccaaagaaacattaagtgtgacccaaacatgagaaaaataagcaggcaatagaaactgcctatgagnagactcagatgttggaattagcaaggactttgaaacagctattataaacatgattcaaagaatgaaaggaaaccatatttttaaaaatcaaaggaagttagaacaatgtttagtcaaatagagactatcaataaacagatagaagctataaatttataagttacagagagaaccaaatggaaattatgaagttatatgtataataattataacaaaagaaatgttcaaaagtaaatttgagaaaagaaagaatctagaaacttgaagacagagtaatagagattataaataacaggaagaaaaaagtaggaagaaaatgaatggcaactc

SEQ ID NO: 3305 - DNA, 661 bp, Homo sapiens
  PKD1L1
  misc_feature [331]..[331]: Chromosome 7, SNP identification no. = rs6977363
  misc_feature [331]..[331]: allele = c, in linkage disequilibrium with rs17131904, respectively
  misc_feature [331]..[331]: n is a, t, c or g
agagaatagaaaaacaaccacaacaataaaaatcaatgaagccaaaagctggttttttgaaaacatcaacaaaatgacaaatctttagctagactgacagacaaaaaataagagagggaaaaagagatgacttaaattactaaaatcaggaatgaaattgatatctctactgaccatatagaaataaaaaggattataggagaacaccatacaaaactgtatgccaaaaaaaatagagaatgtagatgaaatggaaaattcctagaaagaaacaaactactgaaactgactcaagaagaaacagaaatctgaatagtaaagatactgaatnagtcatttcaaaatttccacaaagaaaatgccaggtccaaataactttgctggtaaatgtttatagaagaatcactacccatccttcacaaaatcttccaaatacttgaatgcaaaggaagctaggtgtggcggcacacacttgttatcccagcactttgggaggccaaggtgggaggattgcttgagcccaggagttcgagaccagcctgggcaacatgatgaaattagccaggcatggtggcatgtgcctataatcccagctacttgggaggcggaggtggaaggatggcttgagcctaggaggtcaaggctgcagtgagccatgatc

SEQ ID NO: 3306 - DNA, 661 bp, Homo sapiens
  PKD1L1
  misc_feature [331]..[331]: Chromosome 7, SNP identification no. = rs6950006
  misc_feature [331]..[331]: allele = a, in linkage disequilibrium with rs17131904, respectively
  misc_feature [331]..[331]: n is a, t, c or g
aagaacaaagttagtgggctcaggtttttcagtttcaaaatttactactaaactataataatcaaggcagcatagtactggtatgagaagagacattcagactaatggaatagaattgagaatcaagaaacaaacgttttaattaggttatccattataaaaatacagataacctacataaaaatgggtaaagtactaagcagacatttcttcaaggaagatatacaaagcatatgaaaagatgctcaacctcatcaattattagagaaacgcaagtccaaaccttaatgggataccacttcatactaactagaacagctgtgaacaaaangacaataaccagtgttggttaggatatcaagaaaccagaactctcatacctcgttagtgggaatacaaaatggtgcagccactacggaaaatagtttggtagttaccataggacactgtttccattcctagttacctacccaaggaaaatgaaaccacacactcacacaaaaacttgcacataaatgttcatagcagtgtgattcattatagccaaaaagtgaaaacaacccacacatccatcaactaattaatgaataaataaaatatgatatgttcatacaataaaatattattcagcaacaaaaaagaatgaagtactaatatattt

SEQ ID NO: 3307 - DNA, 661 bp, Homo sapiens
  PKD1L1
  misc_feature [331]..[331]: Chromosome 7, SNP identification no. = rs11520726
  misc_feature [331]..[331]: allele = a, in linkage disequilibrium with rs17131904, respectively
  misc_feature [331]..[331]: n is a, t, c or g
ttcacacacagacagcatcttctggatgactaaaactgtgacaagtgctgacaaaggggccaggctccgagccacagggagcccagggagtgaaatacaaactcggcaatggactgtcaaggcttggggttatagtttgaccagttcctacatgatatatagaaatttaacaggcctagaaaaaaggtgaagaattctgacagaggggactttttaaaagacataagacctatttgggggacccaggaattccttcatgtaacaggggtgcagggctgtggtgaggggacctgcagatcaggctcagagtgcaggtgatggccagatgctnagggccacaggcaccgtcataggaaccacatagaaagatcgacgcccaggtgtgccctatgtatctttataacaacattttcaacctgaaactcagtgccaaggattggggacttaattttggaggttgacacttctcaagatgtggtctatggacacttgcagcccaagcgccaggcatctcgtctacaagcaaattccgtgctccatcttctccccacaatcctgagtcagtggatactaggtgggctctggaggcagcaattttaacaaatacccttaacagataaggttggtcctatgcacggatatagaaaatcccaaaggagca

SEQ ID NO: 3308 - DNA, 661 bp, Homo sapiens
  PKD1L1
  misc_feature [331]..[331]: Chromosome 7, SNP identification no. = rs6961473
  misc_feature [331]..[331]: allele = a, in linkage disequilibrium with rs17131904, respectively
  misc_feature [331]..[331]: n is a, t, c or g
agactccacttattttgacaagctgagtctgcgccacactcactcatgcaaaagatgggacaagaaaaggtatgtattaagtatttactatattgtatttattttgcttatgttcgcccccttacaaatcttgagttcaggtattcataggaattggctgtactgatagtgacaattacaaacaaattgtggttgtgaatgatttgagtaacatcactaaccctgacactgctctgggactgtgacctgaaatttggtctgtaaatttatgttaagaaatctttacttccaacacagagctgaggccctggcccaaggtccttctattggnacatttgcccagcctaagtctcacataaccccgtacgcagcttgacttcaagaaaactcaagatcaaacggagtacaaagtcactgtgatacaaagcagagcatgattatgaagatctcaaaatgccctgctcagaagttttgctcaatataattgatttgtatctagaagaaggtacaagtgtttctaactgaaggtgacaggcaaagtttcatgaagaagaaggaacttcagcttggcttaaaggagaggtgaaacttaaataaatcaagtgaatgaactagttcagacttcaggctctaataatcttaccagtccaaattaaagaaa

SEQ ID NO: 3309 - DNA, 661 bp, Homo sapiens
  PKD1L1
  misc_feature [331]..[331]: Chromosome 7, SNP identification no. = rs6965759
  misc_feature [331]..[331]: allele = c, in linkage disequilibrium with rs17131904, respectively
  misc_feature [331]..[331]: n is a, t, c or g
tgaggccctggcccaaggtccttctattggaacatttgcccagcctaagtctcacataaccccgtacgcagcttgacttcaagaaaactcaagatcaaacggagtacaaagtcactgtgatacaaagcagagcatgattatgaagatctcaaaatgccctgctcagaagttttgctcaatataattgatttgtatctagaagaaggtacaagtgtttctaactgaaggtgacaggcaaagtttcatgaagaagaaggaacttcagcttggcttaaaggagaggtgaaacttaaataaatcaagtgaatgaactagttcagacttcaggctntaataatcttaccagtccaaattaaagaaacttctagatcagtgactctcaaccttccctgcacatcagaatcttccaggcatttaaaaaataaaacagaaacttaaaaagtcaccaacccccaagatttttatttaaccagcctgggtttgcacatgtcaagataccttcctaaatggctgcatgtctcttatgctcagttgaagccagttccaagggactggtttagaagtaaccacaacctcaggaacagggtcagagcagaaagttgtaaacactgtgggattcattttgttttgaggttatgttactaacatgctaactcacatt

SEQ ID NO: 3310 - DNA, 661 bp, Homo sapiens
  PKD1L1
  misc_feature [331]..[331]: Chromosome 7, SNP identification no. = rs4724654
  misc_feature [331]..[331]: allele = g, in linkage disequilibrium with rs17131904, respectively
  misc_feature [331]..[331]: n is a, t, c or g
ccttagggggataccttgatttggtttcatctataataaatgcaagattcaccagatatgacatatttcattagtaagtaagaaatgtcctgattttaaatatttaatttatatatgaaaaaacattctctggcattttatcatttacagtgtatttcagttaaaatttaagatataaaaaactgatttaatttattgatattactaatgttctttctgcactaaaaggtagataataaacctaaactgaaaagcattaaactgatcaaggtgattttattttctagacacagtttagtttttgaaaaccaggaaaaaaggtttagaactntaggttggcacagctagtgactccaactggcaccatagcttacctttgtaattgtccaagtgctcaccagctggcaacacaaaataatactgggtgtctctcccatggtacaaagtgtgtttggaggtgtttcctatctggtaactaaattcataatggaagtcctatgatccagtccaagggagcaaaaatagtataaatgaacacactgtgaatgatatcacaatacatacacacacagctgagccttcattgtaccaaggacattctttacagccaggaagagggtaagtgacaggtaagcagcactcccagctgcccagagccctg

SEQ ID NO: 3311 - DNA, 661 bp, Homo sapiens
  PKD1L1
  misc_feature [331]..[331]: Chromosome 7, SNP identification no. = rs2348660
  misc_feature [331]..[331]: allele = a, in linkage disequilibrium with rs17131904, respectively
  misc_feature [331]..[331]: n is a, t, c or g
ctctcatttcaccctcacaagaccctgagcaacaaaatcacaatggtcttctccatggcccagagaaagggtgagggtaagtccgtgttagaaatgtgcctggggagggaaagggccaggctcctctcctcactttgggtcacgtgcctgcctttttcttgggggcagcattaacggaggcccctgttctaaccaggctgcagggcagacgactcctggtgagcaggcccttgtctctttgtgaaattctgaaccttctcaaccagggggccactttgcactcctctcattagtgtgtggggaagcccattcatgcctaaccaactttccnacattcaacggcaggctgaaatccttcacaggtgggaaggacattgctgtccattcctacagcacccgtgactgctgtgactgccagatgccactgtcgggggtctctcaggacagacatggggttgtccacgtaccggttttccagacatgcagaagacactgaagacggtgtgtgcttccagaccatggtggggctgcacctgacaggccatgtcccgaggagccgggttgactgtcaagtacagctgagctttacccagtaagccatgcttcgaagctaaagagaaagatgaagcagcggtttcacccatgatggagaattacagca

SEQ ID NO: 3312 - DNA, 661 bp, Homo sapiens
  PKD1L1
  misc_feature [331]..[331]: Chromosome 7, SNP identification no. = rs2348661
  misc_feature [331]..[331]: allele = g, in linkage disequilibrium with rs17131904, respectively
  misc_feature [331]..[331]: n is a, t, c or g
accctcacaagaccctgagcaacaaaatcacaatggtcttctccatggcccagagaaagggtgagggtaagtccgtgttagaaatgtgcctggggagggaaagggccaggctcctctcctcactttgggtcacgtgcctgcctttttcttgggggcagcattaacggaggcccctgttctaaccaggctgcagggcagacgactcctggtgagcaggcccttgtctctttgtgaaattctgaaccttctcaaccagggggccactttgcactcctctcattagtgtgtggggaagcccattcatgcctaaccaactttccaacattcaacngcaggctgaaatccttcacaggtgggaaggacattgctgtccattcctacagcacccgtgactgctgtgactgccagatgccactgtcgggggtctctcaggacagacatggggttgtccacgtaccggttttccagacatgcagaagacactgaagacggtgtgtgcttccagaccatggtggggctgcacctgacaggccatgtcccgaggagccgggttgactgtcaagtacagctgagctttacccagtaagccatgcttcgaagctaaagagaaagatgaagcagcggtttcacccatgatggagaattacagcagcataggaat

SEQ ID NO: 3313 - DNA, 661 bp, Homo sapiens
  PKD1L1
  misc_feature [331]..[331]: Chromosome 7, SNP identification no. = rs10951934
  misc_feature [331]..[331]: allele = t, in linkage disequilibrium with rs17131904, respectively
  misc_feature [331]..[331]: n is a, t, c or g
gtcccgaggagccgggttgactgtcaagtacagctgagctttacccagtaagccatgcttcgaagctaaagagaaagatgaagcagcggtttcacccatgatggagaattacagcagcataggaataagtttttatagataaaccttatagcaggggttctcaaagtagggtccccagaccagcagcatcggactaacctgggaatttgtcagaaatgaagattctggagccccaccctagacctgctgactcagaaactgagactcagtgatagttttcacatacccttaggggattctgaagttctggggtttgagaaccactgcctanatgttcattaatataacaaacactcactgggtggggcaggtactatcctaggccctggggagacagaagtgtctccctacctgggagtcacatggcaaccacccagacagaaaccgaagcctgagggagagatgatgctaacagacccattacccagcagagcaaactttctccattctcctggattctctcaaaaccttagccacatacacacgtacgtacagcttcgttgaatgtatagcaccaatacaattttatattttgttttattaactatattaatatcataactattttccatgttgacatagagcatccaaaatcattgtt

SEQ ID NO: 3314 - DNA, 661 bp, Homo sapiens
  PKD1L1
  misc_feature [331]..[331]: Chromosome 7, SNP identification no. = rs10951935
  misc_feature [331]..[331]: allele = c, in linkage disequilibrium with rs17131904, respectively
  misc_feature [331]..[331]: n is a, t, c or g
cagcataggaataagtttttatagataaaccttatagcaggggttctcaaagtagggtccccagaccagcagcatcggactaacctgggaatttgtcagaaatgaagattctggagccccaccctagacctgctgactcagaaactgagactcagtgatagttttcacatacccttaggggattctgaagttctggggtttgagaaccactgcctatatgttcattaatataacaaacactcactgggtggggcaggtactatcctaggccctggggagacagaagtgtctccctacctgggagtcacatggcaaccacccagacagaaancgaagcctgagggagagatgatgctaacagacccattacccagcagagcaaactttctccattctcctggattctctcaaaaccttagccacatacacacgtacgtacagcttcgttgaatgtatagcaccaatacaattttatattttgttttattaactatattaatatcataactattttccatgttgacatagagcatccaaaatcattgttgtaaatagcagcataagattacatggaacagatataccctaatacgcacaattattatccccaatgattaaacattttgcttattttccattttctgttattattgatcacccc

SEQ ID NO: 3315 - DNA, 661 bp, Homo sapiens
  PKD1L1
  misc_feature [331]..[331]: Chromosome 7, SNP identification no. = rs4720619
  misc_feature [331]..[331]: allele = t, in linkage disequilibrium with rs17131904, respectively
  misc_feature [331]..[331]: n is a, t, c or g
tattgatcaccccataatgattattctcatacatatagtttttaaatgtttaatgtatttgtcttgagatggattatagaaatgaaatttacatgtcaaatggtttaaaatcttgatgatcatcatcctcatcgtaacagcaggtaccatctattgagcctctgctacacaccaggtgccctgctagacactgttcctgtattatcttatttaacagtcacattaaccatggaagacagatctcataacaaaagtaaaacccaggagaaaaggatgatgaatcctgcctggctgaccaggggaatctccacaaaagaagacacatttgagngaggagtcttggggtatcagtcttatactgggcttaggaagggatgtggggaaaagaatgggcattccagccaaaataaccacagggaaagacttagagtcacgagggggcctggtgttatctgaagagcacgggaagggagggcagcagtcagcgagggtgtgcaaggctgcgggagagaaggctgacaggagacctggagcctgagtgcaccacctggcagccagccaaggacactgaccaggctggtgggccatggagagactctcatgtgtctcctgcaccattaaggaatatggcccagctaagagaactgtctttagacttgtc

SEQ ID NO: 3316 - DNA, 661 bp, Homo sapiens
  PKD1L1
  misc_feature [331]..[331]: Chromosome 7, SNP identification no. = rs17131904
  misc_feature [331]..[331]: allele = c, t
  misc_feature [331]..[331]: n is a, t, c or g
ggtcacacagagtccttggaaatgagttccactcttcccccaggggtgaaattaacatagatactagtgaaacatgccactcctgcttggaaaggttgctggttactgccttctataaacagcctgtcctgcccaacagaagcattactgaggatggtccatccatccctggctcagaaatgacactaatgtcccaagcaacaagagaattctgttaggatcttattttatatgtttataattatgttcatgtttaatttggcaattttataaatcatactataaagtatgattaaggaattttgaagctatttttaagtctgcagaatantggttatggacaatttttaacctgggtgtaactgctgaccgtggtgactggattacttccttagcagagagaggctgacctctcactacttaccctgaaaaaaggagagatcggaaatacaagattgatgatctaaacatggacagtttctaaaattacaatcttacaatagtacttctcaaaatgcttcaaggaaagggtgaagggaaaattatctaaaaatagtgtgaaatccagatcctccccaagaggtctgtaaggatggcacaatcacatgtattaacacgaaagggggaaatacaacaaattgagcaaaagcaccatgtctgg

SEQ ID NO: 3317 - DNA, 661 bp, Homo sapiens
  LOC392027
  misc_feature [331]..[331]: Chromosome 7, SNP identification no. = rs11760600
  misc_feature [331]..[331]: allele = t, in linkage disequilibrium with rs17556689, respectively
  misc_feature [331]..[331]: n is a, t, c or g
caaggacaagacaacaaatactaagtatatctactattttttccatgtaatcctgaagaacctacctaaaacagcaacaaatttttattgcaagctgatctaatttttttccacaagcaaatcccaaataattcacaaagggattattgcaataaaaaaagagagttttgaaagtttgctgaaaataagaaacatctttaaaaataatgtatttttatataccaagagcaagaacaatataattttaaaaaactgcatttataatatcaaactacaacaaacctaaggataataaaacatagctgtagagaaaattttaaaactttcatgnacattaaaaaaactatcacaataaaatattttagcaagttcaatgatataaaattcagtatcttagtgttgttagttttttcatattgttttgtatatagtctcaaatgcaattccactcaaatcctaattagaatctcatatgaaaagatgagaaccaaacaatagttaaaagatatccctaaagaaaaattgaaaagatatttttataaaaaatattcaatctctatataaaattacagaaaataaataatgtttataaggacacaaacatagatataaatggaacataagatagagactctagaaaaaagcatatgtctatgaaatc

SEQ ID NO: 3318 - DNA, 661 bp, Homo sapiens
  LOC392027
  misc_feature [331]..[331]: Chromosome 7, SNP identification no. = rs11764198
  misc_feature [331]..[331]: allele = t, in linkage disequilibrium with rs17556689, respectively
  misc_feature [331]..[331]: n is a, t, c or g
tttaaaactttcatgcacattaaaaaaactatcacaataaaatattttagcaagttcaatgatataaaattcagtatcttagtgttgttagttttttcatattgttttgtatatagtctcaaatgcaattccactcaaatcctaattagaatctcatatgaaaagatgagaaccaaacaatagttaaaagatatccctaaagaaaaattgaaaagatatttttataaaaaatattcaatctctatataaaattacagaaaataaataatgtttataaggacacaaacatagatataaatggaacataagatagagactctagaaaaaagcntatgtctatgaaatctaatattttatagatagatcattatggtcacactgaaagatgtagcactgaattaataatactcagataatttctatccatatggaaaagtaaataaatttagaactttatcacacaaaacataaaattcaattccgggtggattaaagacttaaatataaaaggtaaaaactttaaaatatttaaaagaaaatgagtatgtttctgtcatcttgaagtcactatagatttctaaataagatgcaaatatgtcaaagtatcaagggaaagaccgtcgaacatcaatctctttaaattaaaactttctgttgtaaa

SEQ ID NO: 3319 - DNA, 661 bp, Homo sapiens
  LOC392027
  misc_feature [331]..[331]: Chromosome 7, SNP identification no. = rs11764976
  misc_feature [331]..[331]: allele = g, in linkage disequilibrium with rs17556689, respectively
  misc_feature [331]..[331]: n is a, t, c or g
caatgatataaaattcagtatcttagtgttgttagttttttcatattgttttgtatatagtctcaaatgcaattccactcaaatcctaattagaatctcatatgaaaagatgagaaccaaacaatagttaaaagatatccctaaagaaaaattgaaaagatatttttataaaaaatattcaatctctatataaaattacagaaaataaataatgtttataaggacacaaacatagatataaatggaacataagatagagactctagaaaaaagcatatgtctatgaaatctaatattttatagatagatcattatggtcacactgaaagangtagcactgaattaataatactcagataatttctatccatatggaaaagtaaataaatttagaactttatcacacaaaacataaaattcaattccgggtggattaaagacttaaatataaaaggtaaaaactttaaaatatttaaaagaaaatgagtatgtttctgtcatcttgaagtcactatagatttctaaataagatgcaaatatgtcaaagtatcaagggaaagaccgtcgaacatcaatctctttaaattaaaactttctgttgtaaaactgtgataaggaatgtgaaagacagtctaaagtacagaaaatatttgccacatat

SEQ ID NO: 3320 - DNA, 661 bp, Homo sapiens
  LOC392027
  misc_feature [331]..[331]: Chromosome 7, SNP identification no. = rs7781160
  misc_feature [331]..[331]: allele = c, in linkage disequilibrium with rs17556689, respectively
  misc_feature [331]..[331]: n is a, t, c or g
agtatcttagtgttgttagttttttcatattgttttgtatatagtctcaaatgcaattccactcaaatcctaattagaatctcatatgaaaagatgagaaccaaacaatagttaaaagatatccctaaagaaaaattgaaaagatatttttataaaaaatattcaatctctatataaaattacagaaaataaataatgtttataaggacacaaacatagatataaatggaacataagatagagactctagaaaaaagcatatgtctatgaaatctaatattttatagatagatcattatggtcacactgaaagatgtagcactgaattaanaatactcagataatttctatccatatggaaaagtaaataaatttagaactttatcacacaaaacataaaattcaattccgggtggattaaagacttaaatataaaaggtaaaaactttaaaatatttaaaagaaaatgagtatgtttctgtcatcttgaagtcactatagatttctaaataagatgcaaatatgtcaaagtatcaagggaaagaccgtcgaacatcaatctctttaaattaaaactttctgttgtaaaactgtgataaggaatgtgaaagacagtctaaagtacagaaaatatttgccacatatcaactaataaaagtct

SEQ ID NO: 3321 - DNA, 661 bp, Homo sapiens
  LOC392027
  misc_feature [331]..[331]: Chromosome 7, SNP identification no. = rs7794784
  misc_feature [331]..[331]: allele = t, in linkage disequilibrium with rs17556689, respectively
  misc_feature [331]..[331]: n is a, t, c or g
agttttttcatattgttttgtatatagtctcaaatgcaattccactcaaatcctaattagaatctcatatgaaaagatgagaaccaaacaatagttaaaagatatccctaaagaaaaattgaaaagatatttttataaaaaatattcaatctctatataaaattacagaaaataaataatgtttataaggacacaaacatagatataaatggaacataagatagagactctagaaaaaagcatatgtctatgaaatctaatattttatagatagatcattatggtcacactgaaagatgtagcactgaattaataatactcagataatttntatccatatggaaaagtaaataaatttagaactttatcacacaaaacataaaattcaattccgggtggattaaagacttaaatataaaaggtaaaaactttaaaatatttaaaagaaaatgagtatgtttctgtcatcttgaagtcactatagatttctaaataagatgcaaatatgtcaaagtatcaagggaaagaccgtcgaacatcaatctctttaaattaaaactttctgttgtaaaactgtgataaggaatgtgaaagacagtctaaagtacagaaaatatttgccacatatcaactaataaaagtctagcatacagaatacatg

SEQ ID NO: 3322 - DNA, 661 bp, Homo sapiens
  LOC392027
  misc_feature [331]..[331]: Chromosome 7, SNP identification no. = rs7793897
  misc_feature [331]..[331]: allele = a, in linkage disequilibrium with rs17556689, respectively
  misc_feature [331]..[331]: n is a, t, c or g
ctcatatgaaaagatgagaaccaaacaatagttaaaagatatccctaaagaaaaattgaaaagatatttttataaaaaatattcaatctctatataaaattacagaaaataaataatgtttataaggacacaaacatagatataaatggaacataagatagagactctagaaaaaagcatatgtctatgaaatctaatattttatagatagatcattatggtcacactgaaagatgtagcactgaattaataatactcagataatttctatccatatggaaaagtaaataaatttagaactttatcacacaaaacataaaattcaattccnggtggattaaagacttaaatataaaaggtaaaaactttaaaatatttaaaagaaaatgagtatgtttctgtcatcttgaagtcactatagatttctaaataagatgcaaatatgtcaaagtatcaagggaaagaccgtcgaacatcaatctctttaaattaaaactttctgttgtaaaactgtgataaggaatgtgaaagacagtctaaagtacagaaaatatttgccacatatcaactaataaaagtctagcatacagaatacatgaatgacaatgaaaaaataaaaatgctggatgaattagtgttggctaactactagaacaaacta

SEQ ID NO: 3323 - DNA, 661 bp, Homo sapiens
  LOC392027
  misc_feature [331]..[331]: Chromosome 7, SNP identification no. = rs7795100
  misc_feature [331]..[331]: allele = t, in linkage disequilibrium with rs17556689, respectively
  misc_feature [331]..[331]: n is a, t, c or g
tagatataaatggaacataagatagagactctagaaaaaagcatatgtctatgaaatctaatattttatagatagatcattatggtcacactgaaagatgtagcactgaattaataatactcagataatttctatccatatggaaaagtaaataaatttagaactttatcacacaaaacataaaattcaattccgggtggattaaagacttaaatataaaaggtaaaaactttaaaatatttaaaagaaaatgagtatgtttctgtcatcttgaagtcactatagatttctaaataagatgcaaatatgtcaaagtatcaagggaaagacngtcgaacatcaatctctttaaattaaaactttctgttgtaaaactgtgataaggaatgtgaaagacagtctaaagtacagaaaatatttgccacatatcaactaataaaagtctagcatacagaatacatgaatgacaatgaaaaaataaaaatgctggatgaattagtgttggctaactactagaacaaactactctaaaaatctcagtgacttaacacaatacagttgtatttgtcattcatgtttcattccaatttctcatttgacttgtggccttccaactggtgattcagacaatgagtcccttaataatgactcaccataacct

SEQ ID NO: 3324 - DNA, 661 bp, Homo sapiens
  LOC392027
  misc_feature [331]..[331]: Chromosome 7, SNP identification no. = rs7781636
  misc_feature [331]..[331]: allele = a, in linkage disequilibrium with rs17556689, respectively
  misc_feature [331]..[331]: n is a, t, c or g
acactgaaagatgtagcactgaattaataatactcagataatttctatccatatggaaaagtaaataaatttagaactttatcacacaaaacataaaattcaattccgggtggattaaagacttaaatataaaaggtaaaaactttaaaatatttaaaagaaaatgagtatgtttctgtcatcttgaagtcactatagatttctaaataagatgcaaatatgtcaaagtatcaagggaaagaccgtcgaacatcaatctctttaaattaaaactttctgttgtaaaactgtgataaggaatgtgaaagacagtctaaagtacagaaaatanttgccacatatcaactaataaaagtctagcatacagaatacatgaatgacaatgaaaaaataaaaatgctggatgaattagtgttggctaactactagaacaaactactctaaaaatctcagtgacttaacacaatacagttgtatttgtcattcatgtttcattccaatttctcatttgacttgtggccttccaactggtgattcagacaatgagtcccttaataatgactcaccataacctggggccttaaatccttcactacatctagactttgttgcggggtgataatatatttaagatttggagaagaatgaaaggaattttagg

SEQ ID NO: 3325 - DNA, 661 bp, Homo sapiens
  LOC392027
  misc_feature [331]..[331]: Chromosome 7, SNP identification no. = rs7799263
  misc_feature [331]..[331]: allele = g, in linkage disequilibrium with rs17556689, respectively
  misc_feature [331]..[331]: n is a, t, c or g
attaaaactttctgttgtaaaactgtgataaggaatgtgaaagacagtctaaagtacagaaaatatttgccacatatcaactaataaaagtctagcatacagaatacatgaatgacaatgaaaaaataaaaatgctggatgaattagtgttggctaactactagaacaaactactctaaaaatctcagtgacttaacacaatacagttgtatttgtcattcatgtttcattccaatttctcatttgacttgtggccttccaactggtgattcagacaatgagtcccttaataatgactcaccataacctggggccttaaatccttcactanatctagactttgttgcggggtgataatatatttaagatttggagaagaatgaaaggaattttagggacaaatcttgggagcagtacatgtccacccacatttcatggcccaggcaagaattcatagacagatgtatatacgcacacagacacatggaccacacctacttgttcaggaagacagagagtttggtgaacaaacaaattcaatcaggatttgtattgcaaatacttgcagcccaatggaaaagtggataagaatcatgacataaatgtttcagagaagaaaagaaaatgtccaataaaaatatttaaaatatttttaacctct

SEQ ID NO: 3326 - DNA, 661 bp, Homo sapiens
  LOC392027
  misc_feature [331]..[331]: Chromosome 7, SNP identification no. = rs4265141
  misc_feature [331]..[331]: allele = c, in linkage disequilibrium with rs17556689, respectively
  misc_feature [331]..[331]: n is a, t, c or g
tgtgaaacaacataaattcttacatactgacagtgtcagtacaaacggatatccccatactggaaaacaatttgaatgtatccagtaagttgaggccatgccccaagtcccacttattacctgtcataacaaaaataaataaatttttatttcaatattaaaaactataaatatttgaaatggttattgagaagaacttaggtaagtaaattgctgggtagtcacacaatggatttcaatgcattagtgagaatgaaaaaaaatctacccataaaaatgtgtgtgactatcagcaaaataatatggaaaaaaattggtcacaaaagcatangtacagtcaaaattaaattgcattataccaaaacacacacattataaccccaacagaaacaaaagaatgataaacaggcatgcaaatggttatttctttttgggggcacatgtagggagcacaaccaaagaagacaagaggcttttataattttgatgttgttattccttaagctgaatgctgggtatatgctggtccattttattacacattatacatactgcacttacgtatacttccttttataagcatatggtatgtttttaagtaaatgctgttggtctagatcagaaaaaagtggccaaatatatagaaaaggaaccttgaata

SEQ ID NO: 3327 - DNA, 661 bp, Homo sapiens
  LOC392027
  misc_feature [331]..[331]: Chromosome 7, SNP identification no. = rs1032428
  misc_feature [331]..[331]: allele = t, in linkage disequilibrium with rs17556689, respectively
  misc_feature [331]..[331]: n is a, t, c or g
tccccatactggaaaacaatttgaatgtatccagtaagttgaggccatgccccaagtcccacttattacctgtcataacaaaaataaataaatttttatttcaatattaaaaactataaatatttgaaatggttattgagaagaacttaggtaagtaaattgctgggtagtcacacaatggatttcaatgcattagtgagaatgaaaaaaaatctacccataaaaatgtgtgtgactatcagcaaaataatatggaaaaaaattggtcacaaaagcatatgtacagtcaaaattaaattgcattataccaaaacacacacattataacccnaacagaaacaaaagaatgataaacaggcatgcaaatggttatttctttttgggggcacatgtagggagcacaaccaaagaagacaagaggcttttataattttgatgttgttattccttaagctgaatgctgggtatatgctggtccattttattacacattatacatactgcacttacgtatacttccttttataagcatatggtatgtttttaagtaaatgctgttggtctagatcagaaaaaagtggccaaatatatagaaaaggaaccttgaatagccaaagcaatcttaagaaaaaaacaacaaacctgcctgcgttacattacc

SEQ ID NO: 3328 - DNA, 661 bp, Homo sapiens
  LOC392027
  misc_feature [331]..[331]: Chromosome 7, SNP identification no. = rs12718727
  misc_feature [331]..[331]: allele = t, in linkage disequilibrium with rs17556689, respectively
  misc_feature [331]..[331]: n is a, t, c or g
aaatctacccataaaaatgtgtgtgactatcagcaaaataatatggaaaaaaattggtcacaaaagcatatgtacagtcaaaattaaattgcattataccaaaacacacacattataaccccaacagaaacaaaagaatgataaacaggcatgcaaatggttatttctttttgggggcacatgtagggagcacaaccaaagaagacaagaggcttttataattttgatgttgttattccttaagctgaatgctgggtatatgctggtccattttattacacattatacatactgcacttacgtatacttccttttataagcatatggtatntttttaagtaaatgctgttggtctagatcagaaaaaagtggccaaatatatagaaaaggaaccttgaatagccaaagcaatcttaagaaaaaaacaacaaacctgcctgcgttacattacctgatttccaaatatactgcaaagctgtaataatcaaaacagcataggtattgacatgtaaataaacgtatagactggtagaaccaatagaatagagagcccagaaataatcccatccgtttatagtcaattgacttttgacaaagatgccaagagaacaatgaataaagggcaatgtcttcaataaatgatactgggaaaattgaatat

SEQ ID NO: 3329 - DNA, 661 bp, Homo sapiens
  LOC392027
  misc_feature [331]..[331]: Chromosome 7, SNP identification no. = rs1320888
  misc_feature [331]..[331]: allele = c, in linkage disequilibrium with rs17556689, respectively
  misc_feature [331]..[331]: n is a, t, c or g
tttaaaatgcctatttttctccttcccctgccataaatgtaagggaatttttctataagattcacaatgagaacaagatagggcacctagaggtaaaactctaaaactctaatgtttatttagcctgggcctccagagattttaatctcccaagctagcccaccccagttcagcaatttgtccattaccctgtcagcattctcacccagggctggctccatcagcacttctgactagttggtgctcctgatgagctgtgactttccttatcctcctgtctttccagctttttttagagactgcagaatgtgatgagatctcagttatccantggatctcaagagaattgaatttcagcatttttagtgttgcgagaatcaaaggacatgacttccaaactcttcacattttggactggaagccagatgtcaaaatgactttttcaaatggttttcacgcttttgaaattaccaaatcatgtcctcatcattactcagtatcaacaacatcgtacctcttacttcttacctttttatccaatatagttatttgtttttatgtgtactctttccttttctttccctttgattacaactcagaaaccctttcctcttctgtctaaagctagcgccaacccttgtgatttgcgtgtcattttatt

SEQ ID NO: 3330 - DNA, 661 bp, Homo sapiens
  LOC392027
  misc_feature [331]..[331]: Chromosome 7, SNP identification no. = rs13224899
  misc_feature [331]..[331]: allele = a, in linkage disequilibrium with rs17556689, respectively
  misc_feature [331]..[331]: n is a, t, c or g
atgaaagaaatcaagtgagatctaaatagatggatgttttatcatgttcttggatagatttattatatttattgtataaaatatcaattctcctctaattgagctataaattcaagctaatactattcaaaatcctagcaagttattttgtcaatattaacaaattgattctaaagtttataaggaaaagtaaaagaccaagaatagccaacataatacttcagaacaaagttgaggaactacctacttcaagacttactataaagttacagtgatcaaaacagtgtgttgttatctaagtaatagacaaattgttcaatggacagaagancaagctcagaaataaacccacacaaatacagtcaatgaatgtttgacaaaataggtgattcagtggaaaaaaagaacattcttttcaatatttggtgctagaacaattgtacatccacatgaatctataaacagctcttacacttttcacaaaaatggatcatagacctaaatgtaaaatgccaaattaaacaacttttagaagatatcataaaagaaagtctagatgacatagggttgggtgatgactttttagatatagcaccaaaaacatgatctctgggaaaaaggttgatcatatgaatttcattaaaattaaaaacttatgctc

SEQ ID NO: 3331 - DNA, 661 bp, Homo sapiens
  LOC392027
  misc_feature [331]..[331]: Chromosome 7, SNP identification no. = rs7812171
  misc_feature [331]..[331]: allele = t, in linkage disequilibrium with rs17556689, respectively
  misc_feature [331]..[331]: n is a, t, c or g
atatgggtttgaacaggttcaaaaaatacatgtatcttttacaaacgaacttggacgtaaaacacattattgtgaaatgcaaaacgcacatatatgggagccagcttttcatcacacaggtttgaaggggctgactgcgagacctgagtatggttggattttgctatataccagggtcctggaaccaatcccttgcatataccaagggatgcctgtatatgacttctgaaaaaggcacaactctgaaggcaataaaaagatctatccatgccagaagtttagggagagggataaaacaatgtgaataggtgaagtacagggactattttgnacactgaaactattttgtataatactgttatggtgaatacatgataatatgcatttggcaaacccacagaactgtacaacactctgtaagctatggacctttgttaataataatacaacaatattcgttcatcaattgtagcaaatttaccacagtaatgcaagaaagcaataataggagaaattctgtgagagatgaaaggggagatgatatgtgaagtcttcacattttttatacaagttattgtaagcctaaaatttctctaaaaatatgcctatttgttttaaaacagtgattgcttgggtcaaattagagtaacttagtaggatt

SEQ ID NO: 3332 - DNA, 661 bp, Homo sapiens
  LOC392027
  misc_feature [331]..[331]: Chromosome 7, SNP identification no. = rs10499706
  misc_feature [331]..[331]: allele = t, in linkage disequilibrium with rs17556689, respectively
  misc_feature [331]..[331]: n is a, t, c or g
atccgagagatagggaggtggggaaacttcagagacagaccttggttccgaggcttatttctgagaccttcccattttcaaagcactcagcgtgctaaagcccgtaatttggggcattgttttctgcaccctaatagtgctacgtaggcatagagagctcatggccagtgtaaggaatgcgttcattggactcatggcacagttggaagattccagagttggggagagtttggaaatggagtttcttgaactacaaagtaaggtgattgtttcagtaacttgaaatattgctttccactctaacactttgtgatccaatttgcttttattngtgggaaatgcactccctctggggtttactgtacagagagttggcctttgatgccgcaggttggtgcgataattgatgataaaataatctttgacttaagcttttgttgtcaacaaacctcatggaatgtttttgtttttttccttttatttaggcctcattgtaatttaaatcagctactcattctgcgctgcagaaacattgttatattgtatttttttgtgtgagaactaaactttggtttcattgtactgataagacctacaagtgttatgaatatgtaactcccaggcagaatctggatgaggttcagtgagggcagaaagatta

SEQ ID NO: 3333 - DNA, 661 bp, Homo sapiens
  LOC392027
  misc_feature [331]..[331]: Chromosome 7, SNP identification no. = rs2172510
  misc_feature [331]..[331]: allele = t, in linkage disequilibrium with rs17556689, respectively
  misc_feature [331]..[331]: n is a, t, c or g
taatcctccagccttggtctcccaaagtgctgggattacaggtgtgagccaccaagcagccagctaatattctatattatgatttacttacaactttgattaatacttgaatgaccataggacaagggagaaaataattaactttaggcaattagcccaattatcagaagataatttactcccttatagaaaaaacttggcactttatcattctatgggctattcccccagctcagagatgcatctgagatctgtaaaccttcagtgcagattgcttgtcacacatttgaaaatgagatagaaattttaaacattttaattaaaaaaaatnagtcaagtgccttttctcaatggataatacaaactttgctttgacctccaatatttcccattatatgtgccttatttgcaacaaaaaaaagtaatatttcgctttgagaaaatatgttaccctgcatggagaccctccccttagctcaaaaatagcttggttatcaaatgaggaaacaaaacaccaaatagtaagaattacagagtagtcagagcttcttcaaatttgtacaaggacgtaagtaatcaaacctctgcttacctctccaacttcagttgctttggcctactttctctttttctccaggctccccaatactgcatttattgt

SEQ ID NO: 3334 - DNA, 661 bp, Homo sapiens
  LOC392027
  misc_feature [331]..[331]: Chromosome 7, SNP identification no. = rs17556689
  misc_feature [331]..[331]: allele = a, g
  misc_feature [331]..[331]: n is a, t, c or g
tgaatgcatctctgcccagcaatttacataatctttttcagtttttcccaccttcaagcatcaaaagaacaaagaatggatatttattgatgttttctggaaaaggaacacacaaaatttatcaatagtagcattaatgttttcttatctcatttctcactcctgatgccaaagtaggttgctattataatcaggtcagtttttggaagatgaactttggtggtgaaattatgtgctgttagttctagatcttggaatgtaacttttctgcttctggccctgagttgtattgcctggcatatgagatgaggtaagctgagtgtccatatgntcaacatgaaaggctaggtgtgtgtagtggcagacctgccatctgtgccttccactcccaactccaggccatattcatggagcaaagctaaactctcacaagcacttccaccccatgtgtcttaaccccaaataactttgagatgggcccacagagaacatggtgtcaggggttacaggaggtagagagaggaataaggtgttcgtctttagttgacttgcctacattattatttatctgggaacattctaataggtaataaaaaactatctctggaatattgcacaatttaaaattatattttgctaattttttttttttgagacagag

SEQ ID NO: 3335 - DNA, 661 bp, Homo sapiens
  misc_feature [331]..[331]: Chromosome 7, SNP identification no. = rs12718733
  misc_feature [331]..[331]: allele = c, in linkage disequilibrium with rs17556689, respectively
  misc_feature [331]..[331]: n is a, t, c or g
tttgataaacacgattctgggcacagccctaggccaccgctgagtgacaccaaagccctacttgactctgacagcccctgcggtgtgtgtgggaggccaggagctctggggtctatctgttgatgcaactgagaggtgacagcatgcaggcagccctcgcagccccagctcgctcacgatgcctcctcgccttgacgcccattctagctgtgcttgaggagcccttcagccgccgctgcaccgtgggagcccttctcttggctggctgaggctagagccagctcccttggctggccgggaggtgtggagggagaggcacgggtgggaaccngggttgcacttgcgggccagctggagttcccagtgggcatgggtttggcggccctgcacttggaatgccagccagccctgccggccccgggcagtgaggggcttagcacctgggccagcagctgcggagggtgcaccaggtccccaagcggtgctggcccactggcgctgcgctcgatttcttgcctggccttagctgcctccccacagggcagggctcgagacctgcagctcgccatgcctgagtctccccccaccaccgtgggatcccacatggcctgagcctccctgatgagcgctgccccctgttccatggctctgggtcccatcg

SEQ ID NO: 3336 - DNA, 661 bp, Homo sapiens
  misc_feature [331]..[331]: Chromosome 7, SNP identification no. = rs6974165
  misc_feature [331]..[331]: allele = t, in linkage disequilibrium with rs17556689, respectively
  misc_feature [331]..[331]: n is a, t, c or g
caaaagataagccaagaagaagtagatgattaaaggcaaaatagatccacaggtcactaatggtgtagagacatacagaattacaaaaagcaagaactagttaacagaatttatacctaaaggaaataaaacagggacacacagccacacagaggttgagcaaaaagagcccctgtcttcctttggttgctcactaacaagggagcctggtgttggatgctgactcagcgactgcagaacttggggaaactgggtcaggtgtgccttccttagcagctataatgactccacaaaaattaaacctgaagaagtcgaattaagaattcagacntttctataggtgagcttgagcattctttctaacagtaatttgctaagaagtaatttatttaaccctaggaatttggtagtctcattttgggaccaaatgtcttttctgtggaaactccacgatgagcatcttctcactggtgcctctccctagagaatcagggctgggaggcatgaggcagggaagccagatcaaaacagccagtgttcctaggaggaatgctccaaatttatcctttccaaatttatttatctatttcatacagctaagaagggtaacaagtgcgcaaaagttgggaacctttcagccaagtctctctctgcctgtgtt

SEQ ID NO: 3337 - DNA, 661 bp, Homo sapiens
  misc_feature [331]..[331]: Chromosome 7, SNP identification no. = rs7781475
  misc_feature [331]..[331]: allele = a, in linkage disequilibrium with rs10247706, respectively
  misc_feature [331]..[331]: n is a, t, c or g
catacaaattactttataaggaaataggatctttgcaaatgacactaagttaaaggtcttgagttatggagactatcttgaattatccaggtaggctttaaatccaatcacgagtgtccttataataaagaggcaaaggagatttgacacagaaagaggaagaaaaggcgagtatccatggagacagagattgaagtgaataggtcccaagataaaaaatgccaacaggtagcagaggctgctacaaggaaaggttctcctggtgcctcccgagagatgtgggccctgcaggcttctcagtctctacccaggaacaccgaagctgtgagcngattgatcttctgtttcaagccactaagtctgaggtggtttgttgcagcgaccatctgaaaattgtgctccattgtgaatgaacaggctaaaaactgttaagtgctaccctgtgaataaggaaaaatggaaaaatcacatgattataccacgccactacccttcttaataagatggaaacaaatacctgaagaactaaataaaataaacagcaaaactgcttatgagtcattttatattacttattagaaaatactttttatctaaatgcaaaaatatatgcttttaagattatatattatctacaatttcagaaatgtgagccagtatt

SEQ ID NO: 3338 - DNA, 661 bp, Homo sapiens
  misc_feature [331]..[331]: Chromosome 7, SNP identification no. = rs12535625
  misc_feature [331]..[331]: allele = g, in linkage disequilibrium with rs10247706, respectively
  misc_feature [331]..[331]: n is a, t, c or g
ccacacacacaggacacccacatacaacacaagaaagaatacactgaaaccacattacacatttgctaagttggtaagccagatcataacttgttttgatttttatttcttttgtttggcactgattatgaacaaaattaaaagtaaggagatgaataataaaatcaagaaaaaatagatgtaattagtaaagcatggaatggaaattaatttattagcagtaattatgcacttcacaggtgtcctgcagggcacaaatgggatgaggcttgcaaaatgctcatcaagattggcacatattaaacacttgacaaatcgcagcacccatgcntcttcaaagagctggtccagatgacgtcctttgaaataagacagaataaatttagactcctttctgcataagcattattgagatatgggaaagcaggtgtcatgtcttccttagctcatttttatattccttcaaatctctctcataaaataaattttctggtgatttatttggtcaacgtctcataagtactttctacccaatatgctcatgtctacactattctatgcatctttcaattcgctctaaaatgattttaattctaggattattaatgcaccccagtcatagatacaagctggtaaaaatttaaaccaatttgcttatgtt

SEQ ID NO: 3339 - DNA, 661 bp, Homo sapiens
  misc_feature [331]..[331]: Chromosome 7, SNP identification no. = rs1116031
  misc_feature [331]..[331]: allele = a, in linkage disequilibrium with rs10247706, respectively
  misc_feature [331]..[331]: n is a, t, c or g
acacacacaccgaaaaaaaattacaaccaatatatttcaaaaacttagacataatttatgaataaagagaattcactaattcataaaagaattataccctgaaatcgatttgattgtatcccgtgtttataagccaggtccagtatttggaatcaatcaatataatcctctatgccaaaaactaaagaaaacaaaccacatgattagtcataccaatggatgcagaaaaagcatcaattcaacactaattcatgataaaaactgtcagcaatctcaaaatagaggtcaatttcctcaacttgataaagaacatctgcaaaaacagccaatntaacattcagtggtgaatgctgaatgtctgttcctaccgctcttattcaacataatactgaaaccaaggcaatagggcaagaaaagcaaataaattgtgtacacattaaaaaggaagtcataaaaccatcctcattaacagatggcatgtttatgtatctagaagagcccaagaaatctattttaaaaaataaagaaaatttatgttcacacaaaaacctgtccgcatatattcatagtagcttgtaccaaaatagtcccaaactggacacaacccaaatatccttcaagaagcaaggagatttttaaaaatatggtacatgtgtatggt

SEQ ID NO: 3340 - DNA, 661 bp, Homo sapiens
  misc_feature [331]..[331]: Chromosome 7, SNP identification no. = rs12536328
  misc_feature [331]..[331]: allele = c, in linkage disequilibrium with rs10247706, respectively
  misc_feature [331]..[331]: n is a, t, c or g
ctgtccgcatatattcatagtagcttgtaccaaaatagtcccaaactggacacaacccaaatatccttcaagaagcaaggagatttttaaaaatatggtacatgtgtatggtggaatactgcacagaaatgaaatgaaacaaactattaatccatacagcaacttagatgggtattatgcttaatgttagaaagccagtctcaaaaagttacattcaatatactcaattcatataatattttttaaatgacaaaatgatagagacagagaatgcaattctcaatagaatactattgcttgctaaggtacacagacaggagtgaaagcaacngtaagggagtcaatgagagaattccactcatgcattgtgatggacagtaccaggagctggtttttgtcatgtttccacaaatctatgcatgtaatcacaagcagatatttagaaatgtttgcatgttaaatgtggtacaagatgaataaagtgtgtaatcttgttaacactcctgtaccaatatcaattctctgattttgatactttaccaccgttatgtaagatgtttccatttgggggaagttagacgaggtttcacaggacagtatatttttgcaatatccagtaaatttattgtggttatgcaggagaacatctttattcttagac

SEQ ID NO: 3341 - DNA, 661 bp, Homo sapiens
  misc_feature [331]..[331]: Chromosome 7, SNP identification no. = rs1021466
  misc_feature [331]..[331]: allele = c, in linkage disequilibrium with rs10247706, respectively
  misc_feature [331]..[331]: n is a, t, c or g
ctttaatgtccagcttaataaggtatattattaggttgattattgattattttaaccattatttcagattttaatgcctcctgtagttcaaattgagtctaggtactgacaatagagtggtaaataagaagtcagctttttttctcacggaattcgacagcaaaaggagaagaaagctgaggaaatctgaaatttggtgttacgttctagcatttgagagatgtattctaagtgtgttttggtgccttacttagtctggatagtgggtcaggaaaagatgaaaaggaagccacacttagggtacacctggaaaccatagctggtgggctcnttactgggttactggtttttatacataacgtattgttgtcacacagccacacctatttgtttatgtttagtgtatggctgctttctcactacaatggtggatttgagcggttgtaacactgaccatatggcccacaatgtagaaaatatttactaggtaactttttatagataaagcataggaaatattttaggctttgtgagccgttcaggttgttcaggttggccgttttattacatggagcaatagcttatcaatttttggtctagggaaactggctgtggctatatttatggaaaggacttttatacaagattttttaaaatttta

SEQ ID NO: 3342 - DNA, 661 bp, Homo sapiens
  misc_feature [331]..[331]: Chromosome 7, SNP identification no. = rs6966751
  misc_feature [331]..[331]: allele = a, in linkage disequilibrium with rs10247706, respectively
  misc_feature [331]..[331]: n is a, t, c or g
aaattacaggcgcagtggctcacacctgtaatcccagcactttgggagtccgaagtgggcaaatcatgagatcaggagtttgagaccagcctgatcaacatggtgaaaccccatctccactaaaaatacaaaaattagccaggcatggtggtgcacacctgtaatcccagctacttgggaggctggggcagatgaatcacttgaatccaggagccggaggttgcagtgagcagagatcgtgccattgcactccagcctgggtaacagagcgagactttgtcgcaacaaaaataaataaaataaaaaaaaaaacataaagaaaaagaaaacnaaagtatagggccaggcacagtggctcaagcctgcaatcccagcactttgggaggctgaggcgggtggatcacctgaggtcgggagttggagaccagcctgaccaagatggagaaaccccatctctactaaaagtatgaaaaaattagccaggcgtggtggcacatgcctgtaatcccagctactcaggaggctgaggcaggagaagcgcttgaacccgggaggcgaatgttgtggtgagctgagatcacgccattgcacgccagtcaggtcaacaagagaaaaactccaactcagaaaaaaaaaaaaaaaaaaaaagaaagaaaatgaa

SEQ ID NO: 3343 - DNA, 661 bp, Homo sapiens
  misc_feature [331]..[331]: Chromosome 7, SNP identification no. = rs10247706
  misc_feature [331]..[331]: allele = c, t
  misc_feature [331]..[331]: n is a, t, c or g
ggaggcgaatgttgtggtgagctgagatcacgccattgcacgccagtcaggtcaacaagagaaaaactccaactcagaaaaaaaaaaaaaaaaaaaaagaaagaaaatgaaagtatgccttctacttgctgtgcaacactccccagtgttctgcacgaggtctcccctgagaaaccagatatactactttacacagtctcttttgctaactgacatctttcaagcctatcattaaaaaaacaaatcaactctgctgctcatttcagtttttggaactatgtattttgaagacagcatgatatggtttagttgaatgaaaatggattttatntggaagaactgaattcaaactcatggttcatcattcacaaaacagaaggccatgagcgaggtgctaaatagatatgagcctggggtctagagcctgcaacacaggaaatgtttccctacctcctttgtagggttattgcaaagcttaaatgagaaaattatatcaaagagctttgtaaatggtaatacaataagaacatattctttttggattaatgaatgtagtagagatccaggtttcactggagatgttttctccctgaatttaggcctgcctgaacctcacaggacagtggtgaatccaagtaagtgggaggctgactgggcatat

SEQ ID NO: 3344 - DNA, 661 bp, Homo sapiens
  misc_feature [331]..[331]: Chromosome 7, SNP identification no. = rs1404883
  misc_feature [331]..[331]: allele = g, in linkage disequilibrium with rs10247706, respectively
  misc_feature [331]..[331]: n is a, t, c or g
actcagaaaaaaaaaaaaaaaaaaaaagaaagaaaatgaaagtatgccttctacttgctgtgcaacactccccagtgttctgcacgaggtctcccctgagaaaccagatatactactttacacagtctcttttgctaactgacatctttcaagcctatcattaaaaaaacaaatcaactctgctgctcatttcagtttttggaactatgtattttgaagacagcatgatatggtttagttgaatgaaaatggattttatctggaagaactgaattcaaactcatggttcatcattcacaaaacagaaggccatgagcgaggtgctaaatanatatgagcctggggtctagagcctgcaacacaggaaatgtttccctacctcctttgtagggttattgcaaagcttaaatgagaaaattatatcaaagagctttgtaaatggtaatacaataagaacatattctttttggattaatgaatgtagtagagatccaggtttcactggagatgttttctccctgaatttaggcctgcctgaacctcacaggacagtggtgaatccaagtaagtgggaggctgactgggcatatcctttccatgaaaacttttggcccaaacttttccaaagggaagaaaatgctaaaggcatactaccagggga

SEQ ID NO: 3345 - DNA, 661 bp, Homo sapiens
  misc_feature [331]..[331]: Chromosome 7, SNP identification no. = rs10276925
  misc_feature [331]..[331]: allele = g, in linkage disequilibrium with rs10247706, respectively
  misc_feature [331]..[331]: n is a, t, c or g
aacatattctttttggattaatgaatgtagtagagatccaggtttcactggagatgttttctccctgaatttaggcctgcctgaacctcacaggacagtggtgaatccaagtaagtgggaggctgactgggcatatcctttccatgaaaacttttggcccaaacttttccaaagggaagaaaatgctaaaggcatactaccaggggaactcgcccccagtatttcaacataggttctttctattttccctatttttcagctggtctgagatataaagagaaagagtacagagaggggaattttacaactgggtcactgggggtgacatcanatactggtaggtctgtgatgcccacctgagctgcaaaaccagcaagtttttattatggatttcaaaaagggaggggatgtatgaacagggagtaggtcacaaagatcacatgcttcaaagggcaaaaaggagaacaaagatcacatgcttctgaggaaacagggtaaggacaaaagcaaagatcataaggcaaaaggcgaaattacaattactgttgaggatctatgttcagctgtgcatgtattgtcttgataaacatcttaaacaacagaaaacagggttcaagagcagagaactggtctgaccacaaatttacctaggcaggatttt

SEQ ID NO: 3346 - DNA, 661 bp, Homo sapiens
  misc_feature [331]..[331]: Chromosome 7, SNP identification no. = rs6976723
  misc_feature [331]..[331]: allele = t, in linkage disequilibrium with rs10247706, respectively
  misc_feature [331]..[331]: n is a, t, c or g
ccagtatttcaacataggttctttctattttccctatttttcagctggtctgagatataaagagaaagagtacagagaggggaattttacaactgggtcactgggggtgacatcagatactggtaggtctgtgatgcccacctgagctgcaaaaccagcaagtttttattatggatttcaaaaagggaggggatgtatgaacagggagtaggtcacaaagatcacatgcttcaaagggcaaaaaggagaacaaagatcacatgcttctgaggaaacagggtaaggacaaaagcaaagatcataaggcaaaaggcgaaattacaattactgntgaggatctatgttcagctgtgcatgtattgtcttgataaacatcttaaacaacagaaaacagggttcaagagcagagaactggtctgaccacaaatttacctaggcaggattttttccccactctaataagccagagggtactgcaggagaccaaggcctatttcagtccttaactcaactgcataagacagacaatcccagagctgcagtttatagacctctccccaggaatgcattccttccccagggtattaattattaatattccttgctgggaaaataatttagcaatatattccctacttgcatgtccatttatagactctct

SEQ ID NO: 3347 - DNA, 661 bp, Homo sapiens
  misc_feature [331]..[331]: Chromosome 7, SNP identification no. = rs1464888
  misc_feature [331]..[331]: allele = t, in linkage disequilibrium with rs10247706, respectively
  misc_feature [331]..[331]: n is a, t, c or g
gagaggcaaggagctaggggtgcaaagaactgagccagagcggagcgatgagccttcgccagccccgggagggcgcctccaaatgcaggtgcctgggctgggaatgcggagactcagcacagaaggtcggctggaggcctgggctgcaggtgcctgggttgggaaagcggagactcagcacagaggcctgggctgcatgcccctcatccgctaacgtgcacgcctgtgggctgggtgtcagcttgccccatgaaaactgcctggcagccttgtcgctgcccatgtgcgcacatgacgcctccctgggcccttggaatgatcgagctcatgnaaagcttgaatcgcatatttgacatcatgctcaagcccgtggggctgggcggccagtgtggatgtacttacctgctctgccagttaggatctgggtaagctctggggacttggtcaacctctctaagcttcattctctgcattctaaaagtagggatgccagctgctcataagcgttaaaataacacttcatgagctcaggagtgaagagcaaatcaagatagtttcagacaaaagcgaacgaagacaatttgattccagcggacctaccctgaatagctcttcatgtaaagtgtgcaccccgtgtctgggtgtcataaagtctccgtac

SEQ ID NO: 3348 - DNA, 661 bp, Homo sapiens
  misc_feature [331]..[331]: Chromosome 7, SNP identification no. = rs7797216
  misc_feature [331]..[331]: allele = t, in linkage disequilibrium with rs10247706, respectively
  misc_feature [331]..[331]: n is a, t, c or g
aatagtgggaattgacacatgggcattggcaaatcctactaataatgtctatattttggagagttctttgttagcaatttgccatcataccagtaagttagacagatttgttattaaatccttccccaaccacatacaagatgagtgaacctctcagcaaattgcttaaccctctgtgagccttggcttctacattgtagcacaagaggaaataatagctatcccagaggattgcttcagtaaatgagatgatatgtgtaaagtgtatgatccattgcaaattcttaaatggtagctataatgaccttaattcatattaaaatttcttaantcctgagatatagttagaagtcagatatgtctagtttcttcctgctgccaaataattgactccactgcttagacaagaaaataatggagctgactgaatgtgatcttcatttccatcgaaggtacttagggcaagagttgccatttataatgactgctaataccaattactggttgcttctgatctgctttaacatgggatcacctggtatagcatgaataattaatttacagaataaaaacaaagaactttgggggagtctcagcatttttgtttacatattgaagagttccaaatggttttcgacatgtgcctgtgctccattttacc

SEQ ID NO: 3349 - DNA, 661 bp, Homo sapiens
  misc_feature [331]..[331]: Chromosome 7, SNP identification no. = rs932587
  misc_feature [331]..[331]: allele = c, in linkage disequilibrium with rs10247706, respectively
  misc_feature [331]..[331]: n is a, t, c or g
attatatgaatgtttacctattgcacatgcacttgatgtccctcataaatatgcaaaacttttccccaaaacctgctggatatgtataatacaggccctgtaagttataaaacccaacttgttctttttgtagaaaggggaactttggcccatgctgcagactttatcttcccaacttgcaaagcaatatcaccagtaaagctcacctttctaccatgtagtcattccagtggtcttttggatgacacaagaatttacaaatcacacaatatctgtctaaatgactagatcatctgtccctcttctttgtctttctttcagtgtaccacanaatgccttgtttataacatgtgctgagaaagaaagaatacaaaattaacaattgattaagaaagaaaatgaaaaagtttctttgtggatacattccagaaagaaaccacatatcaatgtctagagcaacactttccaaactttgtttctgaattcctgagttagaattacttgggggccctgctgaaattgcagatttcagtgtcttcttctggatttactaactgagaatctcagagaatggagccaaaaaaataacattcatgtatgctcccttgttgattttcatacacaccaaagctggaggatcacttatgctactgagaatatt

SEQ ID NO: 3350 - DNA, 661 bp, Homo sapiens
  misc_feature [331]..[331]: Chromosome 7, SNP identification no. = rs6948918
  misc_feature [331]..[331]: allele = g, in linkage disequilibrium with rs10247706, respectively
  misc_feature [331]..[331]: n is a, t, c or g
acacatgcacgcacacacgtgcacacactaaaagagagaaccatgttttcaaatcaaagaggacaaattttaactcaagacaaatttgatgggagccaatggtttttctcaatgtataagttaatcttacttgggattaatagcaaattgcaaaggaaaccatcagtattattcaatgttttcatcatatggaagattagtttaacaggaaaaataaatatcttctaaaaacagtgttattggctccatagttatggtcattaaacaacaaaaatgttactttttttttagagaatttttttttgaatcatacacttttacagatggagtncaatatcttatgttttgttcaaacaattctgtgaaaaagcagcataatacaattttcttctgatctgacatattttcgagttaaatcttagagcatcttggaaaataaggagatgaagccatcactttttttcaaactcctgtgtcaaatactatgtgagaggcagtgtagggaagtgctcagaatgctggcaggtctggaactcaaggccaacaactgtatccaatatataattttctgactgccggaaagttacttaaactatttaactataaaatctgggagatactgtgctaatctcataagatatgattaatgtttggcatcata

SEQ ID NO: 3351 - DNA, 661 bp, Homo sapiens
  misc_feature [331]..[331]: Chromosome 7, SNP identification no. = rs6975256
  misc_feature [331]..[331]: allele = a, in linkage disequilibrium with rs10247706, respectively
  misc_feature [331]..[331]: n is a, t, c or g
caccattactgtccttattttctccctgagtttgttacatgtgttttcttgaggtatctcctcatattttactaagttagcatatcataaaaataatatagatggtataaataaagtttagagtttgaaaaaagctcacgtggttcagtgccttggcaacatttaataaccaattcctaccatttaaaaattataaccaaggacacaatttcacactttatttaaaacatatatcttttgggtttcacataacattttcaattagacaaatatcttcattttagaataaaacaataaaaaatacctaaaacccagaaactaagccattgtnaaatgagtctctaagtggcagaaatagcactgtaatcagcttagaaatgggaagtaaaatagctagaatccactctctttctataggaaaattatacattgataccggagtttttactcatttagcaagtttactcattcactccttccaaacttatttcctgcctgaaacaatcagcctccttttccacaccacgtctactactctgacacacagtttgatgttctttctaaagtaatgtatcacctcgagtttgccaaatatgtgaagggtgttcccaagccaagaccctaaaagcctgaatactagagggtgttttgtttatgggtt

SEQ ID NO: 3352 - DNA, 661 bp, Homo sapiens
  POR
  misc_feature [331]..[331]: Chromosome 7, SNP identification no. = rs10954732
  misc_feature [331]..[331]: allele = a, in linkage disequilibrium with rs6978677, respectively
  misc_feature [331]..[331]: n is a, t, c or g
cctctcctcggcccagcttggaggaggacttcatcacctggcgagagcagttctggccggccgtgtgtgaacactttggggtggaagccactggcgaggagtccaggtgagcaagtgcccgcaggtgcggtgggtggcctgggcgggtcctgtgccgagggcagccaccctggaacaagggctggcagtgggtcgcagcaaggttagaagacactccgtcatagggtcgaggagggaccttggtcccagccaaggactcactctgccacgttgctctgcactgccctggggcagcggggtgcatcccacctctcgacaaggacacatcgcntcgggctctgtggctaggttcaactttggcaaaagggctcatttccttaaaatctgcctccacagacttggccaaaaacataacgttcctctctgtgcccttgatggcccctgggtgctgcccgggcttccttaccttctcccagatggaagcctgcccagccctgccccggcttctgggcgtctggcccccggcagctccacgccgcctccctccttgctccctcgcctgccctccttgtgcatctgcagcaggggctcccctgcttcttgtcgtatgtacctgggacctcaccccaaaggccatgcacggtctcccctgtagtccaac

SEQ ID NO: 3353 - DNA, 661 bp, Homo sapiens
  MK-STYX
  misc_feature [331]..[331]: Chromosome 7, SNP identification no. = rs8565
  misc_feature [331]..[331]: allele = c, in linkage disequilibrium with rs6978677, respectively
  misc_feature [331]..[331]: n is a, t, c or g
agagcttcctgggctagaaacctggagttcaggagaaggtctttgcctggtgatgctggttgcccaggcatgattctctggaacttccagccaggtctgagggatgcccacttgctagacaatgaaatgggctcccagagaaatcatgggacttgccgaggtcacgtgggctggttttgaactcatgcttggaccacgggcccatggaggccagtgtctgacagcaacccaggcccacagggaggagggccaggcatgacccaaccccccacttctttttgcagaaattcaccatcaccttggctctgtcattctgatcttttccacccanggtatcagccgcagttgtgccgccatcatagcctacctcatgcatagtaacgagcagaccttgcaggtatgcgttccccgggccaggctcgcaccacggccaccccctgggaggtgaggtcagagcgcaacctgggaggagtggggccccagcactgctttgggaggaagaatcccagataactccaagtctagggtgctccccagtccgcgtcacccaagggcaaggccccagtgttgcatgcttgaggcctgaggctggatatgcagggctggcccagggactcaggccaggtcaggctgtcctgcagcccccactgctgtcaggccg

SEQ ID NO: 3354 - DNA, 661 bp, Homo sapiens
  MK-STYX
  misc_feature [331]..[331]: Chromosome 7, SNP identification no. = rs12531559
  misc_feature [331]..[331]: allele = t, in linkage disequilibrium with rs6978677, respectively
  misc_feature [331]..[331]: n is a, t, c or g
ccctccgccttagccttctgagtagctgggaccacaggcatgtgccaccatatccagctaacttttttgtacagatggggtctcacaatgttgcccgggctggagggtaagttacttgaggccacggtgtcctcatctggaaaacgggatcacagtatactacctacttcatacagtttggttttgttctgtgctgagcccagtgcctggcacagaaatatcagctctaatcacagcacccctgaagctgtgagtcctgcccagggagaggaaatctaagctggcacccgaggctggtctggcaaccctcaggaactgaagataagcctancaagtgcaaaatcacagactgccagggctgaagaaggacgcagagatgacgatggccaccttcctcaccatctgaataaaggaactgagcatgcagtttaatttattgactggctcagtgctacccagggaggcaggctagatggggtccctccttgggccacaaggctctgccatctcgaggtgggacacatgggaagtctcagcctcaggccctggttgagcaacatttgacatctactgggcaaataaaggatggttggggctgggtgtggtggctcacgcctgtaatcccagtactttgggaggctgaggtgggtggattgcttga

SEQ ID NO: 3355 - DNA, 661 bp, Homo sapiens
  MK-STYX
  misc_feature [331]..[331]: Chromosome 7, SNP identification no. = rs6978677
  misc_feature [331]..[331]: allele = c, t
  misc_feature [331]..[331]: n is a, t, c or g
tctcttctaaaaaatacaaaaaattagccgggcatggtggcgggcacctgtaatcccagctacttgggaggctgaggcaggagaatggcatgaacctgggaggcggagcttgcagtgagctgagattgtgccactgcactccagcctgggcgacagaatgagactccgtctcaaaaaaaaaaaaaaaaaaacaaaacaacaacaacaacaacaaaaaactttcgtttatttgaaacacagacaaggattatctctacatttcccaaagtgtgttctaagaaacactagtcccccataaggcactatgagaaaagggttcaggggttcaganaaccaaatgcaatctgtgtgttccacatccatatattcaagcaaccttggatgaaaaatatccagaaaaataattcatggttgcatctgtacagaacatgtacagactttttttcttgtcattattccctaaacgatacagtataacaattatttacatagcatgtacattgtattaggtattataaataatctagagatgatttaaagtatacacaagaggggccaggtgaggtggctcacatctgtaaccccatcactttgggaggccgaggcaggcgcatcacctgaggtgaggagcttgagaccaacctggccaacgagtgaaacc

SEQ ID NO: 3356 - DNA, 661 bp, Homo sapiens
  MK-STYX
  misc_feature [331]..[331]: Chromosome 7, SNP identification no. = rs7788763
  misc_feature [331]..[331]: allele = c, in linkage disequilibrium with rs6978677, respectively
  misc_feature [331]..[331]: n is a, t, c or g
caagagaggcctgttggtgggcaggttcggttgagcagagactccctgcatagcagcactgggaggagctaagaccgcactctctcccctgactatacacacaggcccagaagcactgagacagtggatggagagtctgttaaatcccaaggatcctccacaactgtgttcccttctgagaaaagctgaccacagctgactggaccagagagaagtgcctgaccaaagaacagctggtctgctgactgatccacagcctattaggtaccctggtgtcagagaaaccatggtcaattgaattagtgatatcctttctcatggggagagtgtntggcagtggagattgaatccagaaataccagactggatgcagtggtttgcacctgtaatcccagcacttcaggaggccaaggcaggaggattgcttgaggccaggagttccagaccagcctggacaacagcaagatccccgactctatgaaaaaaaaaaaaatacaaaaatgccaggcatagtggcatgcgcctgtagtccctactactcaggaggctgaagtggacggatcacttgagcccaggaggcggaggctgcagtgagctgcgattgtgtcactgcactccagtctgggtgacagagcaagaccctgtcccaaaacaacaacaa

SEQ ID NO: 3357 - DNA, 661 bp, Homo sapiens
  MK-STYX
  misc_feature [331]..[331]: Chromosome 7, SNP identification no. = rs1044483
  misc_feature [331]..[331]: allele = c, in linkage disequilibrium with rs6978677, respectively
  misc_feature [331]..[331]: n is a, t, c or g
gttggccgggctggtcttgaactcctggcctcaagtgatccacccgcctcggcctcccaaagtcctgggattacaggcgtgagccaccacgcctggctagatatgttgtatttaagattttattctcctctgcgcactatatttcactatacagttttgaagcattcctgatcatttacatgattactgtcatctttgcttgaaggtatgttaaaaaagagtttaattcattatattactttgtggtcattcatctaaaatagagttatgttacccttgtgtgttattgattcttcccagcaggatgcctggtttgcttttatgtgaaccnacagagctttacaacatcctgaatcaggccacaaaactctccagattaacagaccccaactatctctgtttattgggtaagtacttggaaaaaagcggaggaggtcaaacacagtgtccttcaaacattatttttgatgagttaacaaacttttggcggggtggggggcagtgaatgactttagaacagggatccctgggctgggtgtggtggcacacgcctgtaatcccagcacttgggaaggccaaggtgggcgaatcacttgaagccaggagatcaagaccagccaggccaacagggcaaaaccccatctctactaaaaatacaaaa

SEQ ID NO: 3358 - DNA, 661 bp, Homo sapiens
  MK-STYX
  misc_feature [331]..[331]: Chromosome 7, SNP identification no. = rs4732542
  misc_feature [331]..[331]: allele = t, in linkage disequilibrium with rs6978677, respectively
  misc_feature [331]..[331]: n is a, t, c or g
ggttaggctccacttcagagttaccagacgatgctcctgggaaatgccagcacctcaacttaaacctcagatccttctcacctcctcaaagacttcagttctcagcaccccctccacagcatcatcagtttcagcctccacatgggtccttcctgttgacatgcaaacatcctcttgtacctatctgttcttctttccagcagaagcgtggaaagagaaacaccatctctcaaaagcgtggtgtttcatttaccgcctccacttcttcacctccaattatgctgtccctggagtcaaactcttttaggtctgaatcctggctctgcgattnactatcagctgcctggccctaaggagtggttagcttctctgtgcctcagtccccacctctgtaaaatgggggtgagaataatattgccacttctatataatgagggtgacagtacctgcctggtgtatgtggattcatgaagtcacatttgtcaggcattctaagcagggaggaaatactcagtgagtactggccatgggcataacctacttctttggagctgctgcctttttttgagacaaggtcttgctctgttgcccatgttggagtgcagtggcactatcatagcttgctgcagcctcaacctcctgggctcaagtgatcctccta

SEQ ID NO: 3359 - DNA, 661 bp, Homo sapiens
  MK-STYX
  misc_feature [331]..[331]: Chromosome 7, SNP identification no. = rs2302437
  misc_feature [331]..[331]: allele = a, in linkage disequilibrium with rs6978677, respectively
  misc_feature [331]..[331]: n is a, t, c or g
tgtctttattcgtaaagcagaaacagtgggaccgtcagagcactgccgggcaggcgagagaagacaggaactgtatgaccacggaagttgttgtccctacaacctatttgctcatctggaacacagaatagtggtcctctaaagcttgcagggctggaggtcgccattatcagcagtggtgtcactaaacctgaacccaagggtctctgcaacttgggaaacgacggcccggatctgaggagatggccccttcctcccaccccgcctaaggactctcagcctccctgaccctacctttccggagctcagagtcccctctggcctccaaggncagaaggaatgggtttggctgaggtcgggggctcgggtctgggacgcgctccacctccccggctgcgcgactatggccaggctccctgtcggagcctctgcctggggccccacctggaaaaatggctcctctaaggcgcttccagcctaaagcccgtcctcttccacctcttgggtgcagactggccctcccactccgaccgcaggtcccccaccggccacacagacggctacgctagaacccagccaaacaccggggttgccaggatggtcccacagctttcctttccgactcccggaagtggccgtgatctcacgagatcccggaggc

SEQ ID NO: 3360 - DNA, 661 bp, Homo sapiens
  MDH2
  misc_feature [331]..[331]: Chromosome 7, SNP identification no. = rs6976532
  misc_feature [331]..[331]: allele = a, in linkage disequilibrium with rs6978677, respectively
  misc_feature [331]..[331]: n is a, t, c or g
cgagtagctgggattacaggcatgcgccaccatgcctggctaattttgtatttttagtagagacagggtttctccatgttggtcaggctggtctcaaactcccgacctcaggtgatgcgcccatctcagcctcccaaagtgctaggattaaacgcgtgagccaccacgcctagctggatcctgtatctttaacagtaaaagcgtaggaagcacatagccccaatgtatttacttataggtatatgtactaatatatacattacaatataaactcaagtagaaattttaaaacaaaccataacacgttataaagtgttaaaacttataaatnaaggcagtgttaacatatgtcggttttcaacacagttgccaagcagtgtgctgttgatagccactctgccacccagcaaaggtcagcgggtctggaagacagctctttgacaaggagatcatgatctaacctccgggccaccaaagattttcatctcattgcaaagcatgtaaagattatactacttaaggattgtggttttgtaaaaattaagttggtgacatcctgtaatatacaaacagtgacatcaccttgacaaagtgaaagcaaagaaaccagtgaggcagtcttcttcccctccctcccccatgttgtgttcaccttatgtac

SEQ ID NO: 3361 - DNA, 661 bp, Homo sapiens
  MDH2
  misc_feature [331]..[331]: Chromosome 7, SNP identification no. = rs1639609
  misc_feature [331]..[331]: allele = t, in linkage disequilibrium with rs6978677, respectively
  misc_feature [331]..[331]: n is a, t, c or g
taactgttccaagctgaaatgcccagggccagctgctactttgctgcctgttcttctgattagcctggtatgaaacagtgattctcaaactgtttggtatcaaaatcatctggggaaaatggcaaaaatgccaaggcctaagccccatcccgcttccaggagcctagtcctgagtgggcttcattagctcagcaggtggctctgatgcacacctaggctggagaaccagtgtgagatactggagcccgagatgacagatctgactcaccaggagggttggagtctttcgcaacgtacgtaaccccttccacctcttgttaggcagctcctngtcctgcctgaggctccagccacaagtttgctgcctggatgaatcttctctgattccccacccctgcagggagttgattgccgcaaccccatctgccctcttgcacaaggggcttctgtgacagtgttctccctgctcctaatgcatctcattacctgtctcctacagagccagcagggatcttcctgcaacctcagttaccgggagggcctgttgctaggcactcagtgtgtgtttatagtttataaagctgcaggttgaagggaaggctgctgttaccagtccagctgcctgatggagtccagcttgttcttcatctttcaggagggt

SEQ ID NO: 3362 - DNA, 661 bp, Homo sapiens
  MDH2
  misc_feature [331]..[331]: Chromosome 7, SNP identification no. = rs1104879
  misc_feature [331]..[331]: allele = c, in linkage disequilibrium with rs6978677, respectively
  misc_feature [331]..[331]: n is a, t, c or g
ctgcttcgatcttgactttttccttaatgcaggagccttcttaacccgaatatacagcccaaaagaaaatgggcaacccattcagagaactctggaaggtgcacgaacataaaatttgccaggcagcctccccagctgttcacaccaacttaagactcatgtaaacaccatcagacacggtatcgcatacgctgtcagaggggaaagaaatcagtagaatctttctggacagcaatttggaactttatagtaaaagctttgaaatattcatacctactaattctgtgtttagaactctaagacttcaacaagatgtaaagataaagatacntactgcaacttacattaatatatttatatttacagaagcaaacaggaaacagccaatggtcaacagcagagctatcataaatgataaattacagctttaagaataattttatcaagaattcgggctgggcgcagttgctcatgcctgtaatcccagcactttgggaggccgaggtaggtggatcatttgaggtcaggagttctagaccagcctggccaacatggtgaaaccccatctctactaaaaacacaaaaattagctgggcatggtgttgcacacctgtggtcccagctactcgggaggttgaggcaggagaatcacttgaaccca

SEQ ID NO: 3363 - DNA, 661 bp, Homo sapiens
  MDH2
  misc_feature [331]..[331]: Chromosome 7, SNP identification no. = rs869806
  misc_feature [331]..[331]: allele = c, in linkage disequilibrium with rs6978677, respectively
  misc_feature [331]..[331]: n is a, t, c or g
gctctgtcgcccaggccagtgtgcagtggtgcgaccttggcttactgcagcctctgcctcccaggttcaagcgattcttctgcctcagcctcctgagtagctgggattacaggtgcatgccactatgcccagctaatttttgtacttttagtagagacaggatttcgccatgttggtgaggctggtctcaaacaaccaacctcaggtgatcctcccgcctcactctcccagagtgctgggattacaggcatgagccactgcgcccagccagtttaaaacccatgaattctttatttctgaaatcttccgtgtaataatttcagacctcaantgactgctggtaattaacacagcagaaagtgaaaccatggataaggtgggactatctgcattctactcaggatttccattcctggtcccctgttgtccccatttcctcattcacacacagtcgcggacacacacacagccaccccaggccccactcactggtttttgcaggtagctgcttactctcggaaacgttgagtgctgcgtcctcactgagagggcggccatggttccccagcttgacctgcagggccttgtgctcatttaacagcagccacctcactgctccttcctggcggagcctgggtcctggtgtctgaggatgaggatc

SEQ ID NO: 3364 - DNA, 661 bp, Homo sapiens
  MDH2
  misc_feature [331]..[331]: Chromosome 7, SNP identification no. = rs869804
  misc_feature [331]..[331]: allele = a, in linkage disequilibrium with rs6978677, respectively
  misc_feature [331]..[331]: n is a, t, c or g
caggtcaccctaactccctgggacccgtttttttcttctgtaagtgggggaaacgacaacctcatgaagtcataaatactaaatgacttcacacacggcgagtgctgaacacgtcacccgggacgccagaagatgacagaatggccaggtttctattaggcactggttagctccccaacaaagggaatagcagctctctatttgtgacccaccaccctgaggagcttctggggaacgcaggacccttagaggccaggagcacgagctctgcatgcctgctggcatccatgcctctcagtgacatcatggtccctgccccttcaccccaatngatcctcatcctcagacaccaggacccaggctccgccaggaaggagcagtgaggtggctgctgttaaatgagcacaaggccctgcaggtcaagctggggaaccatggccgccctctcagtgaggacgcagcactcaacgtttccgagagtaagcagctacctgcaaaaaccagtgagtggggcctggggtggctgtgtgtgtgtccgcgactgtgtgtgaatgaggaaatggggacaacaggggaccaggaatggaaatcctgagtagaatgcagatagtcccaccttatccatggtttcactttctgctgtgttaattaccagcagtca

SEQ ID NO: 3365 - DNA, 661 bp, Homo sapiens
  MDH2
  misc_feature [331]..[331]: Chromosome 7, SNP identification no. = rs2286830
  misc_feature [331]..[331]: allele = t, in linkage disequilibrium with rs6978677, respectively
  misc_feature [331]..[331]: n is a, t, c or g
ctgatcccatggcttggcttgcagtgcacccccaaggtggactttccccaggaccagctgacagcactcactgggcggatccaggaggccggcacggaggtggtcaaggctaaagccggagcaggtagagtctcaggcagccccggggctgggtgccagtgaggccctgcgagagctcagggttggggagaaatgctgcttgtccctgggcatggacgatccttttcagtgttgatttgcagttgcctggtggaaaatccctgtgtgagagggcagctcggcctgctttgtggggttgagagtcatttttgagggtggcagagtcaattcnacaccattcatgtataagtaacaagaaatcggggtgctgactgaaattctccactgtcaggctggaaggtgtgcaggtgtcttggctggcggggccggctcacctgggcgtcacgtttgtggcaccagccaggctgacctgtctgtgcccccctaggctctgccaccctctccatggcgtatgccggcgcccgctttgtcttctcccttgtggatgcaatgaatggaaaggaaggtgttgtggaatgttccttcgttaagtcacaggaaacggaatgtacctacttctccacaccgctgctgcttggggtacgtatccaggcgtgggtcc

SEQ ID NO: 3366 - DNA, 661 bp, Homo sapiens
  MDH2
  misc_feature [331]..[331]: Chromosome 7, SNP identification no. = rs11972240
  misc_feature [331]..[331]: allele = t, in linkage disequilibrium with rs6978677, respectively
  misc_feature [331]..[331]: n is a, t, c or g
cggagcaggtagagtctcaggcagccccggggctgggtgccagtgaggccctgcgagagctcagggttggggagaaatgctgcttgtccctgggcatggacgatccttttcagtgttgatttgcagttgcctggtggaaaatccctgtgtgagagggcagctcggcctgctttgtggggttgagagtcatttttgagggtggcagagtcaattctacaccattcatgtataagtaacaagaaatcggggtgctgactgaaattctccactgtcaggctggaaggtgtgcaggtgtcttggctggcggggccggctcacctgggcgtcacgnttgtggcaccagccaggctgacctgtctgtgcccccctaggctctgccaccctctccatggcgtatgccggcgcccgctttgtcttctcccttgtggatgcaatgaatggaaaggaaggtgttgtggaatgttccttcgttaagtcacaggaaacggaatgtacctacttctccacaccgctgctgcttggggtacgtatccaggcgtgggtccttctgactgtggaataagggggcgttccctttgcttaagcctcaggagctctccctggccctttatgcagtaagctcatgtgcctgcctggcgagtgctgttgttttcaagggtgg

SEQ ID NO: 3367 - DNA, 661 bp, Homo sapiens
  MDH2
  misc_feature [331]..[331]: Chromosome 7, SNP identification no. = rs10476
  misc_feature [331]..[331]: allele = a, in linkage disequilibrium with rs6978677, respectively
  misc_feature [331]..[331]: n is a, t, c or g
gtattcagtttacccgtacatgctcctcccgcccctcctgttggcacccttgcatcgcccaggcctgattcctcctgggggtagttcacccccacgggttcatagttcagcggcgaatgccaggcagctgttttctggctgagcaaacagcacctttctcattgagcttcctctactgacctctgtcccccttgggatttcatcttctgaccgaaccctgatgttcagtggcagagacagcccatagccagaactgtgggtagaccagggttggggtgtgcggtttgggacagcccaaaccccagccgctgtgtcaaggcctaggacgccntgctgccatcaaaagggggttccaggtttccatcagtggcctaaagaagggacttcttgttgtactgaggagtgcggaattaaagagatttgactccctttagtattgggggcagtccgttccccagacactgtggcctctgaagtggaaactgaaagctgcatacctgggaaagaactttctaggaataggcaatggccttcagtggaagagggagggctggaggtgtgcccagtacttggatgttcatctgtccacaacagctttttgtttttttaaaaaagctaaaatggaaatggattttatcataaaggatgacatcgttttctt

SEQ ID NO: 3368 - DNA, 661 bp, Homo sapiens
  misc_feature [331]..[331]: Chromosome 7, SNP identification no. = rs8200
  misc_feature [331]..[331]: allele = g, in linkage disequilibrium with rs6978677, respectively
  misc_feature [331]..[331]: n is a, t, c or g
cccccttgggatttcatcttctgaccgaaccctgatgttcagtggcagagacagcccatagccagaactgtgggtagaccagggttggggtgtgcggtttgggacagcccaaaccccagccgctgtgtcaaggcctaggacgccatgctgccatcaaaagggggttccaggtttccatcagtggcctaaagaagggacttcttgttgtactgaggagtgcggaattaaagagatttgactccctttagtattgggggcagtccgttccccagacactgtggcctctgaagtggaaactgaaagctgcatacctgggaaagaactttctagnaataggcaatggccttcagtggaagagggagggctggaggtgtgcccagtacttggatgttcatctgtccacaacagctttttgtttttttaaaaaagctaaaatggaaatggattttatcataaaggatgacatcgttttcttctacaattaatacatgttcattgtataaaacccaaaaagcagctaaaaaataaagcgggaaaggaactactggtaatacttgtcctctcttgcatatttcataggttgagagaatgaagcctgctctgcaggttatctgctactgtaacaatcccagccctctccactctggtggcttttaggcta

SEQ ID NO: 3369 - DNA, 661 bp, Homo sapiens
  misc_feature [331]..[331]: Chromosome 7, SNP identification no. = rs1639617
  misc_feature [331]..[331]: allele = a, in linkage disequilibrium with rs6978677, respectively
  misc_feature [331]..[331]: n is a, t, c or g
tggcaggaacacggccggggaaggccaccgtgaggcaagatctggccccggggaggccactgcgaggccacaggtgggcctggagagctgggctggaggaggttttggtcgtacgaatgctgccgggatctgggcacgagccgagtcagaagcagctgtctgcaggctggggctgggcatggaggcgcagccgcgagagagtgctgggcctggagagtaggctgggaggcagccaccgggccgtggtggtggcttgccaacttgggcctgcagaggctgccacgagggaaaagccgggcctctgaaagaggccgttcagagggatgagccnggcctaaagaggtcatcgggatgcaggagccgggcctgcggaggccgccaaaaagcaggagcctggcctgggggaggtcacggtgaggcacgagatgagcccaaagaggccgtcgggaggcaagagccaggtctgtcggggctgccgcgaggcaggtggcaacgtggcctggggagaccgacgtgaggcacgagccgggcccggagaggccgctgtcacgaggagctgcgcctctccaggccgccggggagccgaaggtggggcctgagaggcctcacttcgaggagcctggggcctacaaaggctgccaggagctgggcaggagctgag

SEQ ID NO: 3370 - DNA, 661 bp, Homo sapiens
  LOC401383
  misc_feature [331]..[331]: Chromosome 7, SNP identification no. = rs1639620
  misc_feature [331]..[331]: allele = a, in linkage disequilibrium with rs6978677, respectively
  misc_feature [331]..[331]: n is a, t, c or g
tgccgcgaggcgagagctgggcctggaaaggccgctgcgaggcaagaggcgggcctggagagctggactggagcaggctttgggccgatgtaggttgccaggagctgggcaggagccgagtcaaaggaggctgtttggaggcaggagctgggcctgtgggcgcagccatgagcaaatagctgggcccggagaggaggccggcaggcagcaactgggccgggggaggccgatttgaggaagttctgggcctggagatgtcgccagaagggaaaagctgcgcctcaagaggccgcggtgaggcaaagccaggcaaaaaaaggccatcgggacncaggagctgggcctgcagaggctgccgaaaggtgggagcatggcctggggaggccacggcgaggcacgagatgagcctctttaagaggccctcggcaggcaggagctgggcttgccaaggctgccgcgaggcaagcggaaacgtggcctggggaggccaatgtgaggccacagctgggccaggagaggccttcatcatggctccggcgttggggaccctgctcaagtacatccaaaaggacccttcccacaccagtctttatagcggtcaagtgcagcagccacttagcacccaaggcatgtgccacagctggcatttcatcacaatcaa

SEQ ID NO: 3371 - DNA, 661 bp, Homo sapiens
  LOC401383
  misc_feature [331]..[331]: Chromosome 7, SNP identification no. = rs11982200
  misc_feature [331]..[331]: allele = t, in linkage disequilibrium with rs6978677, respectively
  misc_feature [331]..[331]: n is a, t, c or g
tctcctgccttagcctcccgagtagctgggactacaggtacctgccaccaaacctggctaattttttgtacttttagtacagatggggtttcaccgtgttagccaggatggtctcaatctcctgacctcgtgatctgcctgcctcggcctcccaaagtgctgggactacaggcgtgagccaccatgcccagtctaatttttattttattttattttttgagactgagtctcattctgttacctatgctggaatgcagtggtgcaatcagggctcactgcagcctcgacctcctgggctcaagtaatctcccctaatttttatttaagaaantcagtcttggttgagcgtggtagcttacgcctgtaatctcaacactttgggaggctgagaggggtggattactcgagcccagcagtttgagatcagcctgggcaacacattaagaccctgtctctatgcaaaaaaacagagtgaatttatgaaaggcaatttttcccacagactggtggtggagggaatgacttcaggatgattcaagtgcattacatatattgtgcactttatttctattattattgcattgtaatatacaatgaaataattctacaactcatgataatgtacaatcagtgggatctctgaacttattttcctgcaact

SEQ ID NO: 3372 - DNA, 661 bp, Homo sapiens
  LOC401383
  misc_feature [331]..[331]: Chromosome 7, SNP identification no. = rs4398845
  misc_feature [331]..[331]: allele = g, in linkage disequilibrium with rs6978677, respectively
  misc_feature [331]..[331]: n is a, t, c or g
gaaaagtctaggctgcagtgagtatgggtggattttggtgtacacagaaatgggggagctggaactaatccccccaatataccaagagacaaattgtatctgtttttacaattatactgtaggatacattatgttccatgacaatggtaatttttaatgacagtttttaattgagtggaattaccataaaaataataaaagtagcagctaatatttactgagctgttactaggtgcctataaataccataaatttttaaattccccataactcttccttattccacttaaccactttatcttaaattactcatgcttgcttcagtagcacntatactacagttggaacaatagggagattggcatggcctctgtgcaagaacgacatgcaagtttctgaatcattccatattttttttaaaaagagaaaaaaattacatccggattttcactgtgtgcatatgaccttttgtttaggttgaattatatccaaagatggtatttccagaagtgagattactgtgagtcacagggcgtgagcattcttattacacttgatgtaaactgtcgagctttcaggcatggtggctgtctgcttataattccagcactttgggaggctgaggtgggaggattgcttgagcccaggaagttgtggctgc

SEQ ID NO: 3373 - DNA, 661 bp, Homo sapiens
  LOC401383
  misc_feature [331]..[331]: Chromosome 7, SNP identification no. = rs4552844
  misc_feature [331]..[331]: allele = a, in linkage disequilibrium with rs6978677, respectively
  misc_feature [331]..[331]: n is a, t, c or g
cctcatctctacaaaaaattagaaaatgagctgggtgcgggggcacattcctatagtcccagctactttggaggctgaagtgggaggatcaaagtggaagctgcagaagtagaagctgcagtgagctctgatcccactgcactccagcctgggtgacagagtgagaaaacatacacacacacacacacacacacacacacccctcatctcagtctgcccagccttcacacacacacacacactcatctcagtctgcccagccttcacacacacacacacacacacacacacacacctcatctcagtctgcccagccttgactagtgaaaanggtcttctggttacagaagacgtatgctcttttttaggaccgggatggaccagcaagcttgttcacagcctttccctcatcctctgcttagttttccaagaaacttcaggtggaaagggagtccctggggaaaagacctaactcatcaggttaccaaaggagaaatttgcatcctttgtcaattaataaatggaacacctgccttaaaaaccagggagttctgctagggtgaatcactccctacaaccctgacctatgcagggaatgtaaaaacctggagtttggggacctataatattgaaggccacattgcagatgtggagaccttac

SEQ ID NO: 3374 - DNA, 661 bp, Homo sapiens
  LOC401383
  misc_feature [331]..[331]: Chromosome 7, SNP identification no. = rs1637051
  misc_feature [331]..[331]: allele = g, in linkage disequilibrium with rs6978677, respectively
  misc_feature [331]..[331]: n is a, t, c or g
cccaggttcaagtgattctcctgcttcagcctcccaagtagctgggatcacaggtgcccgccaccatgcccggctaattttttgtatttttagtggatacggggttttgccatgtttgccaggctggtctcgaacgccggacctcaggtgatctgcccacctcagcctcataaagtgctgagattacagacgtgagccactacgcctggcctaaaacttactttttaccaacaaatttgattttattactcccatggacgatcctttcaagtcatggaattccaaaccaggagggcttcgaaagggaatcctgtctggcaaaccttctacntacaggaacttgggatttgattcaaacacaggatatggttcttttactgcctcagtgagtccaagaacttaagctgaaagtgcaagagaacataatttgtggaaaataaaatctgacacggacattcttttatttgtatctgcattctcaagtacattatggacaagttccctacaatcaagcaatatttacttcatattgaaggcattttgcttaggatattggccaaatctgaagaacaagcttaaaaaataagtacttttgagaggaacactttaaccctttcactcaaaaggagagttatgttattagccaaaatgacctccagag

SEQ ID NO: 3375 - DNA, 661 bp, Homo sapiens
  LOC401383
  misc_feature [331]..[331]: Chromosome 7, SNP identification no. = rs2097948
  misc_feature [331]..[331]: allele = t, in linkage disequilibrium with rs6978677, respectively
  misc_feature [331]..[331]: n is a, t, c or g
ggcatgatggtgcaaacctgtggtcccagctactcaggaggctgatgcaggagaatcgcttgagcccaggagggagaggttacagtgagccaagatcacccactgcactccagcctgggtgacagagtgagactctgtctcaaaaataaataaataaataaataaataaataaaatacttacttaggatctccatttctgtgggtcaggaattcaggagtggcatagctgggtcatttgggctcagggtgtctcatgacattgcactcaagctgtccactgagactgcagtcacctaaagcctgtttccaagatggctccctcatgtgacngctgacaggaggcctcagttcctgttacatgagcctctctacaggctgcttaggtgtcatggtgtgacagctggctttcccaagtgagtaatcaaagagtgagcaaggaggaagccacagtaccttttatgatgtagtttgcaaagttgcaagccatcacttttgctttttcctatctgtcagaagggaatcacgtaacccagccctcactcaaggcgatagggactgggctccacctttgacgagagtatcagagatgtattttaaatgaccaactatgtttaattattgcaagtacggtcactgcagaaaaactggaaaatagggaca

SEQ ID NO: 3376 - DNA, 661 bp, Homo sapiens
  LOC401383
  misc_feature [331]..[331]: Chromosome 7, SNP identification no. = rs10085567
  misc_feature [331]..[331]: allele = a, in linkage disequilibrium with rs6978677, respectively
  misc_feature [331]..[331]: n is a, t, c or g
caacctctgcttcgtgggttcatgcgattctcctgcctcagcctccgaagtagctgggattacaagcatgggccaccacgtcaagctaattttttgtatttttagtagacacagggtttcaccatgttggctaggctagtctaaaactcctgacctcaagtgattacccgcctcggcctcccaaagtgctgggattacaggcatgagccactgcaccagattttttaatggctgcatacatttcatcatatgtatgtatcataacatttaatgaattctattatgggatacttaggctgttacaggatttccctgtatacattttgttaantgaacatccctacagcacatttatttgtagaatcatgactgtttcttaaatccctagaagtgaaatttctggaacacagtttgcataactttaaaacttcaaatgcctgttacctaatttgagcagaatttttactgcaataatcaagagtccatttggccaaatgtcttatctatgacaacacctgcaaaagttcaaatattgataactataagtgaatttgttgagagtgactgaaatcactacagaatgcaaagttgctgtaaaaactttactaaagagtgaactggccgggcatggtagctaatgcctgtaatccgagcactttgg

SEQ ID NO: 3377 - DNA, 661 bp, Homo sapiens
  LOC401383
  misc_feature [331]..[331]: Chromosome 7, SNP identification no. = rs6954569
  misc_feature [331]..[331]: allele = t, in linkage disequilibrium with rs6978677, respectively
  misc_feature [331]..[331]: n is a, t, c or g
gtttttccggggaccccttcctacctagcagtctcaccatgaccatctcattctttttgctacatctacatattattaaatagatttaatgcatgttttgataatttacgtattttatggacacttctatttatctaacccactgaacatttttggtggctttataacattccattatattaactgacttattcgactctcctctaccactgtgcatttaggttgattcccctctttcactgttgtgcatcatagctataaataattttgtaaggactatcttcttttgggttacttctctgtgatacatctccaaaagtggcattaaccncttaataagaataaacaactttatagtgctaagtatctattgctagccacactcctcagaaactcagtgcacactgtcattaaccacgtgtatgcgcttatttccctatggcccttacaacattgggcttgataatttgtatttgattttactgattttatatgtagaacatacgtatgtattcctcactttctgccaaagaatatttaaagtctatttaaaagataaatgcagttcagcacaacagactagaaaataaaaagaataacaaataactgtaatcccagtgctctggaaggctgcagctagaggatcgattgagcctaggag

SEQ ID NO: 3378 - DNA, 661 bp, Homo sapiens
  misc_feature [331]..[331]: Chromosome 7, SNP identification no. = rs10245584
  misc_feature [331]..[331]: allele = c, in linkage disequilibrium with rs6978677, respectively
  misc_feature [331]..[331]: n is a, t, c or g
acttggccacctaactatgaaacacacagtgtagaaatggaaaataggtggcttagtggctcttcaaacaggagaaatctgaggccatatccaggtgtctgatataaactagtgatgccttacaaataggcatggtgatatttgtactagttaattacctctttactttagtacactaatttagaagtctactaaattattatagaacaagaacacatcacacttccgagcaaaagaaaaacatcaaatccaagttgagcaattttctaaaacatattattatacagcatatatgcttaagtactacaatatacatattctaagttagtanagctatcccatcaacatttcatgtgggctcaagaataaatacaaaacctcagtttttagttctgataaaaatgaaagacgtatgtcacatgaactctgaatttttccatattaaggatatctatcatggttcctaacttaaaaaaaaaatcaataacagctcacttgttttaactccaaatgttttactctagagagaaaaaatacctagagaaagacagctacttacttacacagtctaattacatttctgaagggcgagaaagcaagcttttctcctttacaaactgaattcaatatctaaaaattatttcaacacaagtccactgct

SEQ ID NO: 3379 - DNA, 661 bp, Homo sapiens
  misc_feature [331]..[331]: Chromosome 7, SNP identification no. = rs10264760
  misc_feature [331]..[331]: allele = a, in linkage disequilibrium with rs6978677, respectively
  misc_feature [331]..[331]: n is a, t, c or g
tcctttaatccataaaataaaatgccatagggttttaaaattaaaaagtatgcttcttgtgtactgatatggaaagagctcataaatgtattggaagcaaaaacataaattagcaacatagtgagatgctctctctacaaaaagtaaaaacattagccaggcatggtagtgcgtacctatagtgccagctatttggaggggctgaggcagaaggatcacttgagcccaggagtctgactgcactccagcctgggtgacagagtgagacctggtctcaaaaaaaaaaaaaaaaaaagtaagggatgtacactgtgctgtgttttatataaancagggggtagcggggtaagaatatatgtgtttataaattagaataaaagcacagaaggatacataagaaactaataacaaaagttctgtgaaagtaggggagcaataggccgggcgcggtggctcacgcctgtaatcccagcacactgggaggctgaggcgggcggatcacgaggtcaggagatcaagaccatcctggctaacacggtgaaaccccgtctgtattaaacatacaaaaaattagctgggtgtcgtggcaggcacctgtggtcccagctactcgggaggctgaggcaggagccactgcgtgaacccaggaggcagagcttgc

SEQ ID NO: 3380 - DNA, 661 bp, Homo sapiens
  misc_feature [331]..[331]: Chromosome 7, SNP identification no. = rs10271413
  misc_feature [331]..[331]: allele = g, in linkage disequilibrium with rs6978677, respectively
  misc_feature [331]..[331]: n is a, t, c or g
ctgactaatttggtatttttagtagagacggggttgcgccatgttggccaggctggcctggaactcctgaccttaggtgatctgcccacctcggcctcccaaagtgctgggatgacagttgtgagccactgtgcctggccttattgtccttatttattttgacactcaaattatcccagacttggccagtggaaacccctccaagctggcttctagatcttctgaaatgtcctcgaaatattgaaggggcctttttttccctgccccagccccagaatcagtcatttctctaagaagccctggttcactttaacgaataaagtgtttagantctaaggtctgggtggtattggtattttaactctaaaaaagaaaagatatgctttgtaggattactgtcttcagatccatttgtgaaagaggtacacaagattctacttgtgatgacaagattacaggagttctgaaagaaaagggcactttggaatgtataagcaagtatctcagcttggccaaccactatgacttcctcactcacccagactgtggagactaaaacactttaactgagtcttcacagtcaagatttactttctctgaaggcgtatccaactctaaaagaatgtgaaaatagtcttcaaattccatagaagtttatttg

SEQ ID NO: 3381 - DNA, 661 bp, Homo sapiens
  misc_feature [331]..[331]: Chromosome 7, SNP identification no. = rs4732595
  misc_feature [331]..[331]: allele = a, in linkage disequilibrium with rs6978677, respectively
  misc_feature [331]..[331]: n is a, t, c or g
tcatttctctaagaagccctggttcactttaacgaataaagtgtttagagtctaaggtctgggtggtattggtattttaactctaaaaaagaaaagatatgctttgtaggattactgtcttcagatccatttgtgaaagaggtacacaagattctacttgtgatgacaagattacaggagttctgaaagaaaagggcactttggaatgtataagcaagtatctcagcttggccaaccactatgacttcctcactcacccagactgtggagactaaaacactttaactgagtcttcacagtcaagatttactttctctgaaggcgtatccanctctaaaagaatgtgaaaatagtcttcaaattccatagaagtttatttgtattttgtctgcttccaagctgctatgtatggcgtaaaagctttcctttatgctactaatagaaacaagtaaaataccaagagcaagggcatcatggactaaagaagataaagaatacagaatccaaaaagtctgtttctagtctaggcccaatacattaaaactgcacttaggctaaccttatccaaacacaatggccaaacaagtaatcagtgtgaaatgcaaaatttacctggctaagttatattaagtgatctgtgaaacaaagacataatggaatc

SEQ ID NO: 3382 - DNA, 661 bp, Homo sapiens
  misc_feature [331]..[331]: Chromosome 7, SNP identification no. = rs11764129
  misc_feature [331]..[331]: allele = t, in linkage disequilibrium with rs6978677, respectively
  misc_feature [331]..[331]: n is a, t, c or g
accaattatgaacaaaaagtgagtgattccattatcttcaagctgtaagagagggaagaagggaatgaaagagggagggaatgagggagggaaagaggggaggaaggaagaaggaaaaaagaaaagttaactatggtaaattcctgaaacagtcatattaaagacttattccctgccgaaaatacacagaacccattaagaaagggctaacattggattaaatacctaaacgtaaaggctggaaactacaaaacttaggggaaaagcttcccaacactggattttgcaatgacttctaggatatgacaccaaaagcacaggcaacaaaagngaaatcagacaaatacattaattacatcaagatttaaaacgtctgcacaacacaggaaccaactgacagagtaaaaaggaacaacacacagaatgagagaacatatctgcaaaccacatatctaataaagggttaatatccagaatataaaggaactcctacaagtcaataacaaaaaaataataataataatccggttaacaaatgggaaaggacttcaatagacaattctccaaagatataccaacagccgacaaacatgtgaaaaaatgctcaacatcactaatcatcacagaaatgcaaatcaaaaccacaatgagatatcacttc

SEQ ID NO: 3383 - DNA, 661 bp, Homo sapiens
  misc_feature [331]..[331]: Chromosome 7, SNP identification no. = rs11763076
  misc_feature [331]..[331]: allele = c, in linkage disequilibrium with rs6978677, respectively
  misc_feature [331]..[331]: n is a, t, c or g
ggagaacaagaacaacaggtatcagtacacccaacaacttcgatgaatctcacaggctttatgctgatagatgccagcatcttagttccttctggctgcagtaacaaaataccataaactgggtaggtgataaaaaaaacagaaatttatttctcacagttcaggaagctggcaagttcaagatcaagaagtcaacagatgttggtgtctggtggttcattgaaggtaccttctccctgtgtcctcacatggctaggctctctgcggtctcttctaagtgcactaatcccaatcatgagggctccactttcatgaactaatcacctcccanaggctccacctcctagtagcatcaacttttggattagaatttcaacatatgaatttggaggacacacaaagattcagaccatagcagccaatcttaaaagtttacatactgtacgattccatttaggaactaggggtaggaaaggatgtgactataaaggattagcacaagaaagttttttggggtgatgaaactgttctgtattctgattgtggaagtgtttacataaatctaataaaatttaaaaattcgcagaacattatgctcctcccaaatcaattttactctatgataaaaaaaaaaaaaaaacctcggctggcacggtggctc

SEQ ID NO: 3384 - DNA, 661 bp, Homo sapiens
  misc_feature [331]..[331]: Chromosome 7, SNP identification no. = rs6953665
  misc_feature [331]..[331]: allele = c, in linkage disequilibrium with rs6978677, respectively
  misc_feature [331]..[331]: n is a, t, c or g
ttcaagttactacaaggccatagcaattactacagtgtggtactggcacaaggacagtcatagaaatcaacagaatagaactgagttccagaaataaacccacacatcttcggtcaactgattttccacaaaagtaccaagaccattcaatggagaaaaaagagtcttttcaacaaacagtgctgggaaaattggatagccacgtgcaaaagaatattacattttagatgcttacttcataccacgtataaaaattaactcagaatcaatcaaagacctaaatgtaaaagctaaaactaaagctcccagaagaaaatatagaggtaaaatnttcatactgaatttgacaaagggttttgttgactggagttgacaaagcaggagcaacaaaagacagataaattgtactctcacaaaattttaatctttgtgcttcagaggaccttatcaagtgaaaatagaacccacagaatgaaagaaaatatttgcaagtcatttatgtaataaggaactcgtaaccagaatatataaagaattcttataactcaataataaaaaagtaagtaacaattgtttcagcaggtaaaagatctgaatggacatttctccagaaagataggaaaacagtcatgagtatgtgaaaagatgttccacatcatca

SEQ ID NO: 3385 - DNA, 661 bp, Homo sapiens
  misc_feature [331]..[331]: Chromosome 7, SNP identification no. = rs10275521
  misc_feature [331]..[331]: allele = t, in linkage disequilibrium with rs6978677, respectively
  misc_feature [331]..[331]: n is a, t, c or g
tccacttccccctttgttgggagagcctttgcacatgctgttccaatgtgaggaatgccatgctccttgctgtccaggtggtggtttctttctcattgtttagatctaagctttcatggcagactgtgagaggccttccctagcctatgtgaaatattacctaccccaacctacccaaccctctcctgtcctgggccaaatgccgcttctccatgtcctatttcttattattctttgggaggggtagaggcagggtctcacaaggtagcccaggctggtctttaacttctttaacttctcacagatgtgagccaccatgcctggccttcgngtgctatttctttctcttttccttttttttttttttgagacagggtctcactctgtcacctaggctggagtgcagtggtgcaatcatgggctcactgcacgcgacctacccaagctcaagcgatcctctagcctcagcctcttgaatagctgggactaccggcctgtggcaccacacctggctaagttttgaattttttgtagagacagggtttcgccatattgaccaggctgatctcaaattcctggcctcaagtgatccacccaccttggcctcccaaagtgctgggattacagacatgtgccactacacccagcctccatgtcttat

SEQ ID NO: 3386 - DNA, 661 bp, Homo sapiens
  misc_feature [331]..[331]: Chromosome 7, SNP identification no. = rs10227345
  misc_feature [331]..[331]: allele = g, in linkage disequilibrium with rs6978677, respectively
  misc_feature [331]..[331]: n is a, t, c or g
gctcactgcacgcgacctacccaagctcaagcgatcctctagcctcagcctcttgaatagctgggactaccggcctgtggcaccacacctggctaagttttgaattttttgtagagacagggtttcgccatattgaccaggctgatctcaaattcctggcctcaagtgatccacccaccttggcctcccaaagtgctgggattacagacatgtgccactacacccagcctccatgtcttatttctaataaatattttttatttacttatttacctgttggtctgtctccctcactgccagaatgcaatttgctgaggacagagaccttatnttccttctctactgttacatttctagtgactcaaatagtatcaatgtggtgttataatatatattgatttttgcccatggttcctggctggtaactaccatagtgctcataccaggttttttttttttttttttttttgagacagggtctcactctgttgcccaagctggagtgcaatggtaagatctcggctcactgcaacctctgcctcccaggttcaagagattctcctgcctcagcctcccgagtaactggtactacaggtacctaccaccatgcccagctatttttgtatttttagtagagacggggtttcaccatgttggccag

SEQ ID NO: 3387 - DNA, 661 bp, Homo sapiens
  misc_feature [331]..[331]: Chromosome 7, SNP identification no. = rs10952840
  misc_feature [331]..[331]: allele = c, in linkage disequilibrium with rs6978677, respectively
  misc_feature [331]..[331]: n is a, t, c or g
tctacatagccgagcatatcacaggttctcaaatctttgttgaaagaataactgaatgagtaaggttattgtagagactatagaataacatggctatagagcaatgatacacactaaatgcataataaatacaaaaatcccttcccccggggccaggtgcaatggttcacgcctataatcccagcactttgggaggcgaaggtgggaggatggcttggagccaagcgttcaagaccagcctgggcaacatagcaagaccctgtctctattatttaaaaatgtttaaaaatctcttcccctcgtgagtgattagcaattacgttaaaattanacatgctggccagccatggtggttcttaaggctctggatgcaaaccactttcatctcagaaaagcaaaaccaaaacactttgcagatgtgagtagtttccctctatccttcttgagcgggccctgcttcatattcctgggttcaatgtcatgccctcagaggtcactcctatctccaggcaactcatctgggacttacaccaaatatccaatcaattctagcaaaatgataagctatccattgaccgcagttaataaaacaggtgatttttttcccttaaatttgttttttttttctagttaaagaagaatactcattattttacaaaac

SEQ ID NO: 3388 - DNA, 661 bp, Homo sapiens
  misc_feature [331]..[331]: Chromosome 7, SNP identification no. = rs10235738
  misc_feature [331]..[331]: allele = g, in linkage disequilibrium with rs6978677, respectively
  misc_feature [331]..[331]: n is a, t, c or g
taataaaacaggtgatttttttcccttaaatttgttttttttttctagttaaagaagaatactcattattttacaaaaccagatatatatagacaagtaaaaaaaatgttttagtcatagagtcactgtatatggtacatattcttatagtgttcccttgcactcattcaacaaatatttatatactgtttgattactgaatgacaggcacttaggatacaaatataagtaaaaataaatcatttcagtccttgtggagcttaccgtgtaatatgagaaatatgactatatatctggaaggcctaaagaaaataaaaccctgttactgctnagaaattaactttaaaatggctttcataaaagaattcatatttatgtgaaataagctaaacaggtacatgaaatctgtggaactcttgtaacagacaaacaataacaagttagaaagtataaaaagaggtatcagtcaaaatagcatgaatatgtaaagacatggaaaatattttaatgagaaaattataatccacataaaaatactgagatatacttaatgcaatgagcgaaaataaaatgttataaccatgtcaaacattccaaaaggtgtaagtttactacgaatggcaataaaaatcccacaagactttttggaactcaacaagat

SEQ ID NO: 3389 - DNA, 661 bp, Homo sapiens
  misc_feature [331]..[331]: Chromosome 7, SNP identification no. = rs7794454
  misc_feature [331]..[331]: allele = g, in linkage disequilibrium with rs6978677, respectively
  misc_feature [331]..[331]: n is a, t, c or g
aggaatgaaggactaatgcatagaacataaaggtacataaaaacatacatgtctttgttgtgttaccaacacaattattgcatttgaactcttatgcattcaaaccttagactaaattacaaagtgactctaagcatttcgtaattttctacaaatgttgatagtgcaggcctgtctactatttttaactcagaagggagttccatggagtttagcccagtattttggagctagaagagaggatcggtcattgagtccaatactctacaggtcagaaaatgaaggagagaggggtcacccgtgctcctttggtcaaagacttcagttgaanggtcaaagagaatccaggccatctcctgactcgggattctttcaagttagcaaatatgtgatgttttcattactcaggaaaagtgtatagaactactttcaaaaatattttagggacaatacactagaagtgttatcaagagataaattgctttgtagttaaaaagtgaaaactacagcctaaatgaaaggaagggagaataaaaggaaaattgtatttttttcagctgtcattataaaagtgatgttgcccccatttaccaatgaaaagacactgagggccacagtgtccctctgagaccctctttccagggtcacatagctgaaatat

SEQ ID NO: 3390 - DNA, 661 bp, Homo sapiens
  misc_feature [331]..[331]: Chromosome 7, SNP identification no. = rs2108274
  misc_feature [331]..[331]: allele = c, in linkage disequilibrium with rs6978677, respectively
  misc_feature [331]..[331]: n is a, t, c or g
gctcttcaaactgaacagaaaattaccctaccccaactgaaacacagagatgcagagggagcctggcccaaaatacaacttttatatccactgggtaacacaaaaatgtgtgtgactcactttactgcagtggtgcggaaccaaacctgtaatatcttcaaagcatgcctgtaatattttacagcagccctggggaaaaaatatgccatccaataagaattgttgaaaactctacaaataattagaagaaatgagttttccacaaatttacatcgaactatggcttcacagcatcactcgttctttacaaatagggcaatcatacaccccngttagcaagcaacagtcctggcctaaaagcacccactttgattctcaaaagtgacctactttggataataaattgcatgatcatcctatgtatgaacccaattagaatacccttctgtctgttcatcttcgaatcctaccctgttcaaggatcaagtgacatctgactccatcttccccactgacaggataattttctctccagttcctgtagctttttataaatatatatatatatacacatacatatatatatgtatatatatacatatatatgtatatatatatacatatacatatatatacatatatatgtatatatatacatata

SEQ ID NO: 3391 - DNA, 661 bp, Homo sapiens
  misc_feature [331]..[331]: Chromosome 7, SNP identification no. = rs6465000
  misc_feature [331]..[331]: allele = g, in linkage disequilibrium with rs6978677, respectively
  misc_feature [331]..[331]: n is a, t, c or g
ggcagaggctggcagatcacaaggtcaggagttcgagaccagcctggccaacatggtgaaactccacctctactaaaaatacaaaacttagccggccatggtggcaggtgcctgtaatccaaactacctgggaggctcaggcaggagaattgcctgaacccgggagacagaggttgcagtgcgtcaagaccatgccactgcacttgcatcctcggtgacagagcaagattccatcttgggaaaagaaaaaaaattaagaaaagacaatctggatgcttgagcacaactaaatcttcatttggggtttctacagagtaacaaaaacaaaatnataattgcaaattgtctcataacatgcttcacggagcatgtgtcctcacaagtaaagtggtaactttgcagcccacaggtctttgaagcatattacaaaaatcttaaatgggatcctttagtctcacattgcattcaagactatcttcctctacacatctagagaaacaatcatatattcccacatatgctataaaaatctcaggcctaaaagcaagacatggaaattattatttttagcaaaagtagcagaaaattgtgaaagaaaatatcagttgcatgccagtcaggtgcgggcagtgttcatgtttcaaaaggtaacactagcatg

SEQ ID NO: 3392 - DNA, 661 bp, Homo sapiens
  misc_feature [331]..[331]: Chromosome 7, SNP identification no. = rs10251863
  misc_feature [331]..[331]: allele = t, in linkage disequilibrium with rs6978677, respectively
  misc_feature [331]..[331]: n is a, t, c or g
gccagcctggcctacatggcaaaactctgtctctaccaaaaatacaaaaattagctggtattagctgggcatggtgatgcacacctgtaatcccagctacttgggaggctgaggcagcagaatttcttgaaccagggaggcagaggttgtagcgagctgagatagtgccactgcactccagcctgggtgacagagtgagattctgtctcaatcaatcaaccaaccaaccaataaatcgttaaaaaggaagcatttaccatgtatttatatgcccggtattatgtgaaacactttactatcttatcacatcttcgggataaatattcagttntcatgaacacaagagaggatactaaggctcagaaaggagaagagacgtggccaggctgtgtccccagagcctatgatctcaccactaggttacagtgcttccaaatagcacgttatgaggtttttgctttaaaatgaaccaataaaaaaggcaaaaaaaggcataagctattaaaaagtaggagaaacactgaaagaaccttaagcacataattaaaaatattatggaaaagttattaattcattagcaaatttactctaattctagactttcattgaggggtatgttatattactcatgatgaagaaaaaatgttcgcttcgagtatat

SEQ ID NO: 3393 - DNA, 661 bp, Homo sapiens
  misc_feature [331]..[331]: Chromosome 7, SNP identification no. = rs9691174
  misc_feature [331]..[331]: allele = t, in linkage disequilibrium with rs6978677, respectively
  misc_feature [331]..[331]: n is a, t, c or g
aatcaaccaaccaaccaataaatcgttaaaaaggaagcatttaccatgtatttatatgcccggtattatgtgaaacactttactatcttatcacatcttcgggataaatattcagttttcatgaacacaagagaggatactaaggctcagaaaggagaagagacgtggccaggctgtgtccccagagcctatgatctcaccactaggttacagtgcttccaaatagcacgttatgaggtttttgctttaaaatgaaccaataaaaaaggcaaaaaaaggcataagctattaaaaagtaggagaaacactgaaagaaccttaagcacataantaaaaatattatggaaaagttattaattcattagcaaatttactctaattctagactttcattgaggggtatgttatattactcatgatgaagaaaaaatgttcgcttcgagtatattaacataaacaccagccggacgtggtggctcacacctgtaatcccagcactttgggaggctgaggcgggcggatcacgaagtcaggagatcgagaccattctggctaacatggtgaaaccctgtctctactaaaaatacaaaaacattagccgggtgtggtggcacatgcctgtaattccagctactcgggaggctgaggcaggagaatcgct

SEQ ID NO: 3394 - DNA, 661 bp, Homo sapiens
  misc_feature [331]..[331]: Chromosome 7, SNP identification no. = rs4342518
  misc_feature [331]..[331]: allele = t, in linkage disequilibrium with rs6978677, respectively
  misc_feature [331]..[331]: n is a, t, c or g
cccagaccttacatatacaagtttaactgggaccccaaagcaaaaaatcccaaccctttttctcccaatcactgaaacaccaggagggtgtaacagttttgtagcctagctgtagtaggctgatgcccccaagatgcccatatcctaatcccgggaaccggtgaacatgaccttatatggcaaaaggggctttgcaagtataatgaagttaagggtctttggccagcttgtcccggcagggtttatgtactcacctggatcctcgtaagagcacagcaggtgatggagagcggtgggaggtgtagtgatgaaagcaggaaactcgagtcantccagaagggcagcacaagctaaggagtacaggccgcctccagggccaggaaacagattctcccgcagagcctgggaaggcactgaccctgctcccaccttgactcagtgggactgattttagaattctggccttcagaaatgtaagggaatacctctgtgctgttttaagccactaagtgtgtggtaatttattgcagcagcaacgtgaagcctcaaaacccacctgaaggggccaggcgcagtggctcacacctgcagtcccagcactttgggaagccgaggtgggcagatcacttcaggtcaggagttccagaccagcctggccaac

SEQ ID NO: 3395 - DNA, 661 bp, Homo sapiens
  misc_feature [331]..[331]: Chromosome 7, SNP identification no. = rs4728580
  misc_feature [331]..[331]: allele = g, in linkage disequilibrium with rs6978677, respectively
  misc_feature [331]..[331]: n is a, t, c or g
taggatctccatttctgtgggtcaggaattcaggagtggcatagctgggtcatttgggctcagggtgtctcatgacattgcactcaagctgtccactgagactgcagtcacctaaagcctgtttccaagatggctccctcatgtgactgctgacaggaggcctcagttcctgttacatgagcctctctacaggctgcttaggtgtcatggtgtgacagctggctttcccaagtgagtaatcaaagagtgagcaaggaggaagccacagtaccttttatgatgtagtttgcaaagttgcaagccatcacttttgctttttcctatctgtcanaagggaatcacgtaacccagctcacattcaaggggatagggactgggctctgccgttgaagagggtatcagagaatttgggcacatattttaaatgaccatactatgtttaattattgcaagtacggtcactgtagaaaaattggaaaatagggacaagcaaaaaaaaaagtcacttgtaattccatgaatcaatggataacattactagttgggtgtatataattccaatattcaaaatatatattttctcaaaatataaacacactatatatactgtcgtgtaatctgctctttcacctaatgtattgactatattataaaaaatacc

SEQ ID NO: 3396 - DNA, 661 bp, Homo sapiens
  misc_feature [331]..[331]: Chromosome 7, SNP identification no. = rs9800948
  misc_feature [331]..[331]: allele = a, in linkage disequilibrium with rs6978677, respectively
  misc_feature [331]..[331]: n is a, t, c or g
tgtaatcccagcactttggaaggccgaggtgggcggatctcgaggtcaggagatcgagaccatcctggctaacacagtgaaaccccgtctttactaaaaatacaaaaaaaaaattagccgggcgtggtggcgtgcacctgtagtcccagctactcaggaggttgaggcaggagaattgcttgaacccgggagatgcaggttgcagtgaaccgagattgcaccattgcactctagcctgggcgacagagtgagactccgtctcaaaaacaaaaacaaacaaacaaaaaaaccagcgtcctccctgcagatgagcaggagatcgaagggcccnagaataaggtgctgacccccagcacacacccacagagctgccccctccccaaccaagctttggcccaaagggagggtcccaatgcagggctttggagtggtttcccagtgggttcactattccctattctctccgcaaggccaaagctaataaacgaagtgctgatctgcctccaaagcctctccccagcctattagatgacaacagatgtgtatcgtaggattccatatatgggggtaaaatgtatttgcagttgaatataaaagcatagaggctgggcacggtggctcgtgcctgtaatcccagtactttgggaggccaaggcaggaa

SEQ ID NO: 3397 - DNA, 661 bp, Homo sapiens
  misc_feature [331]..[331]: Chromosome 7, SNP identification no. = rs2158867
  misc_feature [331]..[331]: allele = c, in linkage disequilibrium with rs6978677, respectively
  misc_feature [331]..[331]: n is a, t, c or g
gcctcccatcattgtgtggagccccctcctccctaagccaccagatccacctcaagccccaccttgctgcctaaaaataacaccttcgcgtcctgctggctccccaatccctccctgccccgggatccttctggtttgtattctcccagctggctgtgagctgtgagccggcgccagtgtgccaggccgaccgcaggcccggaattaggttaactccgctgcagccctggagggaggtcgcctgtttggggccgtggttgcgggtactgaaaatgctcccttcatgggctggggcctgattctgtgttgggggaaggcagtgacatgtgcntgggtgtgtatgtgtcgggggctgggtacggtaagctttgacagtggtgactgatggcagatataccccaggctgggctgagctcggctaaaatgtctggctcagaaaagaggggtgcagtgggaccctcccagctcctgctgcaaaccctagagcaaaccctggaaatgtctgcacgcagagcatcttgtcgcctggaatcttccatctgccatctcacagagtcccaggaggcctctgagggaggctgttcaccccacattacacatggagaggcagagaggcgctgccctgaaaccgcctttgcaaaaattaccacagtgagaaaat

SEQ ID NO: 3398 - DNA, 661 bp, Homo sapiens
  misc_feature [331]..[331]: Chromosome 7, SNP identification no. = rs1859793
  misc_feature [331]..[331]: allele = g, in linkage disequilibrium with rs6978677, respectively
  misc_feature [331]..[331]: n is a, t, c or g
actacttactatttctcattctctggtagtcctaaggttttgtttttgttttttgttttaattttttacttaattttagagaaatagaggcagagtcttactatgttgccgaggctggtctcgaactcctggcctcaagcaagcctcctgcctcagcctcccaaagtgacaatcctaagttgatgtttgtggtcagcaggcagctctcctccatgtggtgattcagggacccaggctccttccatcttgtggctccccacccaacccagggccttggaatcctgggcattctgccagcagccaatgcaatggggaaggagagagcagaganggcacatctactttctagggactattccaggaagtggtcacatctgcttgcattccatgggtgagaattagtcacatggttcatctccataccaacaaggaatgctgggagatgtagtccccagattggcattcttgtctcgctgacaactctcctttccggaagggaagcatgaacacttggtggtcacagtgggggtcgtggggagagagaacacagtgagcatgaagtctctgcccctgcctcagccttgcctggaaggcagagttcactgactcaatacctcattcacttattcattggaatgcatcctcattcattcattcattc

SEQ ID NO: 3399 - DNA, 661 bp, Homo sapiens
  misc_feature [331]..[331]: Chromosome 7, SNP identification no. = rs10235086
  misc_feature [331]..[331]: allele = g, in linkage disequilibrium with rs6978677, respectively
  misc_feature [331]..[331]: n is a, t, c or g
gctgggtgagtgttagtaaataggagacaagtaagaatttcttaaagaagagctggataaatgtggaatagtgttcagtgatatttgaagcacatttttctgttcccagaggagatgaacagtggttgagagcctcatgcccagctccatgctgggcacaatgcaacggttgactcagctaatcctcacagaagcttcatgaggaaggcatcattgtccctatttcatagctgagaaatgaagcttgagtgactttcccaaggtcatgaagccactcgcgctgtcctcctggaggcaggagagttactgatgacctgtcccatcctctgantatcaaggcccagttcaatgccagtgtcttgatttatgatgccagctttacaggtggggagcctgaggcaggtgggtgagggcatacagtgcagtaaggaggtgactcccacaaggtcactgggatacttagaggtagaatgtgccttgaaccggccagcggggtgcctctaccccgtcacacctgccaaagggggggtctgggtctgacagtcccatctgctcactgctgcacccgttctgcacctcctctgcctcccaacctcttgctgacctctgccagccagtgactgctccttcctttcttagtggttcaccctcacctcctgag

SEQ ID NO: 3400 - DNA, 661 bp, Homo sapiens
  misc_feature [331]..[331]: Chromosome 7, SNP identification no. = rs245433
  misc_feature [331]..[331]: allele = c, in linkage disequilibrium with rs2040901, respectively
  misc_feature [331]..[331]: n is a, t, c or g
actggaggctgcactgttggcttccttgcttttgaggttttgggacttggattgagtcaccactggcttccttttacctcaacttgcacatggcctatcttggggcttcaccttgtcatcatgtgagtcaatactccttaataagctacctttcatatatacttatacactattaattctgtccctctaattagtccctgactaatacacaaggtaagatttaattgaaaacttgaaatctgtgttttctgtaataataactaccatttattcataaaacacatgctttttgcttccaggatgcaatgccactcagtcctcacaaaataantatagggaaatgttagtattaacattaaacagataagaaatctgtggcttacagaaattgtgtaatttgtccaaagtcccctagttagtaagtggcagaatcaggattcaatcccttttttcatttctcatgctttttctgctgatgttcactttgttgttgttgttgttttttgttttgttttgttctgtttgtttttgagacagtgttttgctctttgttgcccaagctggagtgcagtggtgcgatctaggctcactacgacctccgcctcccagattcgagtgattctcttgtctcagcctcctgagtagctgggaatacaggtgc

SEQ ID NO: 3401 - DNA, 661 bp, Homo sapiens
  misc_feature [331]..[331]: Chromosome 7, SNP identification no. = rs245434
  misc_feature [331]..[331]: allele = a, in linkage disequilibrium with rs2040901, respectively
  misc_feature [331]..[331]: n is a, t, c or g
ccactggcttccttttacctcaacttgcacatggcctatcttggggcttcaccttgtcatcatgtgagtcaatactccttaataagctacctttcatatatacttatacactattaattctgtccctctaattagtccctgactaatacacaaggtaagatttaattgaaaacttgaaatctgtgttttctgtaataataactaccatttattcataaaacacatgctttttgcttccaggatgcaatgccactcagtcctcacaaaataattatagggaaatgttagtattaacattaaacagataagaaatctgtggcttacagaaatngtgtaatttgtccaaagtcccctagttagtaagtggcagaatcaggattcaatcccttttttcatttctcatgctttttctgctgatgttcactttgttgttgttgttgttttttgttttgttttgttctgtttgtttttgagacagtgttttgctctttgttgcccaagctggagtgcagtggtgcgatctaggctcactacgacctccgcctcccagattcgagtgattctcttgtctcagcctcctgagtagctgggaatacaggtgcccaccaccaggcccagctaattttcatatgtttagtagagatggggtttcaccatgttg

SEQ ID NO: 3402 - DNA, 661 bp, Homo sapiens
  misc_feature [331]..[331]: Chromosome 7, SNP identification no. = rs245436
  misc_feature [331]..[331]: allele = g, in linkage disequilibrium with rs2040901, respectively
  misc_feature [331]..[331]: n is a, t, c or g
gggagaaaaaataattttcactttgtacagttattatgataattacatgggtttgggttagtacatataaagggtttagaacagtgcctggaaaatatcatgtgttcaataaaggtgaattagtttacctatgcttattctaatttgggtaaaagacttgtacagtactgggcactttgtagatacagagcaaaaactttgagttaccgattttaaaagtaaacttaactttagttagtgatttctacagaatatttaaaatcgctgtttagaaagagtattttccaacaaataaaaagtaattctgactcaattttttatattaaaatcntgtatgagccaaaaataaaataaataattcaacttatagagtttaaataaaaataagtattagcatatttattataactgcaatgcctggtgctttctctaaatctaaaagaagaattatttttatgtcttctaataccgggattcaatatcaacctacaaagccttattatgagcaaatgctaataaattcaactgtggttatagtgcataacatgaagtaatagcaaatcttggatattctattttttgtaataccaatataatgtcccctttattttcaattttatacaaacaggactttttattattttttacctaactggtttaa

SEQ ID NO: 3403 - DNA, 661 bp, Homo sapiens
  misc_feature [331]..[331]: Chromosome 7, SNP identification no. = rs245442
  misc_feature [331]..[331]: allele = a, in linkage disequilibrium with rs2040901, respectively
  misc_feature [331]..[331]: n is a, t, c or g
ttttattattgaaacaaggtctcactctgttgcccagactggggtgcagtggtgtgatctcagctcacagcagcctcagattccctggttcaagcgttcctcccacttcagacttctgggtagctggaactacaagtgcataccaccacaccagctaactttttgtattttttgtagagacagagtctgatcctgttgcccaggctggtctcgagctccggggctcaagtgatcagtctacctcggtctcccaaaatgctggtattacaagcgtgagctaccaggcacggccttttattacttcttattaaaaatgctaatttttttccanttgtctgcaattgttaccatactccatcaatagagtcagcatctagaagtaataaaatcatcagcttactaatacatgaacaacatacaaatagaactttttaaaaagtatttaataatatggatgatccatcatattttgactattgttttgtattttaattaccaatttttgaaaacgttgcctagttcttctcattgtctaccaactagagaccaccttcctaaaaacggaaaaaagagaccctgcccccatagctaataacttaattatattagcaatattctaaaataagtaataaatgctaagctatactcagatgaacaaaag

SEQ ID NO: 3404 - DNA, 661 bp, Homo sapiens
  misc_feature [331]..[331]: Chromosome 7, SNP identification no. = rs10954564
  misc_feature [331]..[331]: allele = t, in linkage disequilibrium with rs2040901, respectively
  misc_feature [331]..[331]: n is a, t, c or g
taggagatatgaggtacaaggaacaatgctaaacaatgagcatggaaattggtatacatagggatacatactaatacacattttatgtataaaacagttaaaattctataatataatgcaataaataactaaaaataggatgtgatttagaatagaatgaacacagcttaaagtgttttaatgttctcatagtgatgtgattaaggatgaaattgttggttatttttgaatattgatgaacagagtatgtatgttaaattttttagaataaccaagaagaggatagaaatataacaggtactacaaatactagaaaaggaaactgtaccangagaaagcaacgtttagtcataaaaaagtaaagaacaatttaaaaaggaataaaaagggggatgaatattttataaataaatatttataaatatagtactttatgaataaatccaaataaatatacaatgacatcaattaactgactcctatagcaaatattataggctatagttaaatagaaccaaaaaataatactatatgttgcttataagaaacatatctaaaaggtaaactaagtttgaccataataattaatctgattaacagtgagttgggataaaatctctgtaatctgttttatgcagcatttaactaaagcatccactaa

SEQ ID NO: 3405 - DNA, 661 bp, Homo sapiens
  misc_feature [331]..[331]: Chromosome 7, SNP identification no. = rs2886992
  misc_feature [331]..[331]: allele = t, in linkage disequilibrium with rs2040901, respectively
  misc_feature [331]..[331]: n is a, t, c or g
tatagattattaggggaatgtggcacagcaatttcaaatagggggctcatggaggccgcacagagcagcaaggatctgaaaaggagagggacactatgtaaccatctagggaagagcattctaaaattaggcaaaagcaaatcaaaagcctcgaagctctgagcctgggggtttaggataggcaatgaggccagagaagctggagtgggtagctaacaggaagagcacttaaggctgagaggtaatggtgactttgacaaggttgttagccatgcaggtggtgacatgggcgtggcactattatgggtgtactttgaagttatacctgacngtgtttgctgacaattggatggaagttttgagaaaaagagaagaatccaggaagacaaaggtttgggtaaagaacctggattatttatctgtgtaaataatgaataaaatgcaatcaaggtctaggtttctacatacttttattatctcattaaagttttgaaaattctgattggaagtatcaaaaaatattaataagatgaaatgacttatctggcattatgtaatttttcctttatttctcaaggtattttaacattagagtttttttatttgccttttctttcctgctttgaaattctgtttctaatacagtaatttttcaaattct

SEQ ID NO: 3406 - DNA, 661 bp, Homo sapiens
  misc_feature [331]..[331]: Chromosome 7, SNP identification no. = rs10235727
  misc_feature [331]..[331]: allele = c, in linkage disequilibrium with rs2040901, respectively
  misc_feature [331]..[331]: n is a, t, c or g
ctaggtttctacatacttttattatctcattaaagttttgaaaattctgattggaagtatcaaaaaatattaataagatgaaatgacttatctggcattatgtaatttttcctttatttctcaaggtattttaacattagagtttttttatttgccttttctttcctgctttgaaattctgtttctaatacagtaatttttcaaattctcaattttaaatttccattgttctatattatcccttcatacttttcctaattgattcatatttgtgtgacatacttagggcagagttttccaaatatgcaagttaaggctaaaccagtatgancattatggtgtggttggcgttgtactcattttgaatatttaatgcttattattcacatccacatttggggcagataatactttctctaaggattagaaattaagtcaggttaatgcatctaaggctctgcagctattaagctgtgaaattgtgtaaaaatgattggcagagagatctttaatacaggaaacccataagtaccctgttaactacttaggcagacaagtagagtgacctaagagtgtcttaggtcacttttagcaatagggatataaatcatgcattctcttggcagtttttcatttttgttatgacttacaacttcattta

SEQ ID NO: 3407 - DNA, 661 bp, Homo sapiens
  misc_feature [331]..[331]: Chromosome 7, SNP identification no. = rs1012951
  misc_feature [331]..[331]: allele = t, in linkage disequilibrium with rs2040901, respectively
  misc_feature [331]..[331]: n is a, t, c or g
ctgcttcctatgaaacaagtgggtcacgtgctagagggtgctggtggcaatgtagtatcttctttggtccttggccaatggggtcacatataaggacaaagaaatccaagcagcaagaagctggaggtatacaagagcttcctaggggcttcctaaggatttagaagccatcatttgaaatagagacttatctatctgcctcaatggaagtacgggtggcggaaccccaagagaatctctgaaaaatgtttgaagtgtcccactataaaaacagatgattttaaatctttgccaggtccagcaccagcttaaaatagaacccatcagtcantagttgaagtaaaatctttcttattcccttgattctcctctctcccatgcttacgcagagtaggaaaagagaaaagccatgcatttcttaaaccaaatgtcagagaatatcaactgctggcaagatgtaaaagtctttctttataatggaaattaaatattaaatatagtcttggactggatattttaaatttctgatttgacagtctctgttttcactaaaagcaataatagaactctcaattaccaataagcaaacaaaaaagtcatgagatctgcccaaattttacccattggcacaggaagatacttgtcaatgaaataaattttg

SEQ ID NO: 3408 - DNA, 661 bp, Homo sapiens
  misc_feature [331]..[331]: Chromosome 7, SNP identification no. = rs10486817
  misc_feature [331]..[331]: allele = c, in linkage disequilibrium with rs2040901, respectively
  misc_feature [331]..[331]: n is a, t, c or g
ttcttaaaccaaatgtcagagaatatcaactgctggcaagatgtaaaagtctttctttataatggaaattaaatattaaatatagtcttggactggatattttaaatttctgatttgacagtctctgttttcactaaaagcaataatagaactctcaattaccaataagcaaacaaaaaagtcatgagatctgcccaaattttacccattggcacaggaagatacttgtcaatgaaataaattttgaaaagaaaaggggagataaaactaaagttagcattttgattgcaatttatagcttatgcatcatgcttctacaagatttatgccnaagtatatgcttcctgaatatataaatatgtatatacatatatagctatacatttgtgtgtgtgtgtatatatacacacacacatatatatatatatgcttcctgacagtggcatttgtaagaatctgagaatataatctagaataacataaagccagcagctaaaacctaaaagatgacaacttaacttcagacattacctatgatttttatacttgtttcttttaaaaatcttacacaattctagttaaatgatgaagaccaatctgagctcctgttgtgttttatttgtatttacctaaaattttaaattagactatggtttttgtt

SEQ ID NO: 3409 - DNA, 661 bp, Homo sapiens
  misc_feature [331]..[331]: Chromosome 7, SNP identification no. = rs2189565
  misc_feature [331]..[331]: allele = g, in linkage disequilibrium with rs2040901, respectively
  misc_feature [331]..[331]: n is a, t, c or g
ttaaatgatgaagaccaatctgagctcctgttgtgttttatttgtatttacctaaaattttaaattagactatggtttttgtttgctttttgtatctagagaattaagtactctaaggaagactgcaactatattactctattcggtagttggtaaataatagttgcacacaaaattggaagaactgtaaattctggaattagccataatgatctgatgctttttaaaaattgaatttgttgttagtatctattttaacatattttaaaaatattttatctgttgtatgttcatgtgttgtaatgccattaaaatgagcatgtagctagcnaatcttctgtaaatgttcttacaatcttgtggaagaacatttttaaacttaaacaaatatgaatataagctgaaatttcgcaacttaattggtctttgacttaggacttcactgaattcattagtaaaatgacaggaaaaataactacaacccttttgaattgcagaatcacagattgtagcataatggacaagcctcctttgttaataaatgcataatagaaatgtattttaaatttccttacatttatacttcctatttctatatctcttttctcttaggtaagaagcaaagtagcaggaagtgactatcttaaaacaagtagattat

SEQ ID NO: 3410 - DNA, 661 bp, Homo sapiens
  misc_feature [331]..[331]: Chromosome 7, SNP identification no. = rs2107399
  misc_feature [331]..[331]: allele = t, in linkage disequilibrium with rs2040901, respectively
  misc_feature [331]..[331]: n is a, t, c or g
aatgcgatcaaaataacaaaaggggcattgaattccatttgcactctttcccatgttggaacttagttttactcttttgattaaaatatttgttggctttgaatttaaaatgacactgaatatagtttcagtgagatttttttcctaatttcttgatcaacttatttccctaaatccatagttgtcttgtggagatcgtaaacacctgcagccatttccaagaactatacttttgagttaaggcctccaaactagaaaatatatggatttctgatcaaactgtcattctaagtttgtacatttttggccactcttgcttcaaatataagcnataataggtaaaatacctaagggaaaaatcagaatgacatagttttcttttacaaaacaaaaaaaaaaaaatcaaagtaccatgaacaaacaaggaaaactacagaatacaaagtacatgagtgtatataacataattatcacatatatgttagataatagcaatgttacatgtaatggacaataagatatactgaaatggtaattcataaagccgttctagtccagttttattataacttaatgtgtccttttggtgaaagggatttttactagaccgtctgtccaagtcttaaactagagagcattgtctgtgtttttttttttcttt

SEQ ID NO: 3411 - DNA, 661 bp, Homo sapiens
  misc_feature [331]..[331]: Chromosome 7, SNP identification no. = rs10215927
  misc_feature [331]..[331]: allele = g, in linkage disequilibrium with rs2040901, respectively
  misc_feature [331]..[331]: n is a, t, c or g
ttggttaaaaaaaaaattcagtttttaaagtaacaaattccacaacaaaaattttaggaattacaacgtaattaaaaaaatagaaaaaagttttcatattttctttcagtcttttaaaactattttatatagttgtgactaaatgccgtatgtttgtgtttgtacagatgtaaatgtcctaacatttccttcattttctatttcatattccacttttttccttaacattacagagtaatatttttatgttattatgaatttgttttaattctgttagttacataatattctgtaagtgctatttgttattaacaattattgtatttttgtncactgaggaatttccaaatatacctctaatggacaaaagataacttgatcttttacttcaatattttaattacatttataagaataaatttccagaagtgggaatcctgggtcaaatggaacattttttaaaacaaatggaatacaaaagtagtctttaggtgttgccacttgcaattctccaaatgacttaaatatcacaactcaaatgttgtagtgttaaagcatttttttcctttttatagctgtacaaccatctcttgatcagcaaagaaaaaaaattaaatgtctgcaaatcttacattgatatagactcatattttcagcctgt

SEQ ID NO: 3412 - DNA, 661 bp, Homo sapiens
  misc_feature [331]..[331]: Chromosome 7, SNP identification no. = rs12534736
  misc_feature [331]..[331]: allele = g, in linkage disequilibrium with rs2040901, respectively
  misc_feature [331]..[331]: n is a, t, c or g
ttctctgttttaaagggaattatcttttctcccgtatagtattttttgtatttagtattataaattaaattttataatatttctactacatgtacaactttattttttaatcagcatcattctttattttaaatattcttcgtattttagtatcttatctagaaaatattcctacttaaattaattcattacttaataattgtgcaaaattttaaaaattattttctataatttgagcctattatgtttaatcagtcaaaataacaatgggaattatcaaggtttacttttagaatacttgactatgttttatagtgtaagtacagaactntgaatcaaaagtcctaagttttcaaagatgctatcactttattataaattgatctcatttaattttcatccaaagtctagacattgctttattacacattttacaggtaaggtaatttggctcccagagattaactttgtctaaaaaattcattcttctattataccatcctacctcgtattaaatattgggtagaaagagggtaaaatattgagccctagatgaaaatataagcttgtattttatatgttaatcttgatatttaccatgtcttgtgatgtgcttctctatacagagttttaaatagtagcttggatggaaaaaaatctg

SEQ ID NO: 3413 - DNA, 661 bp, Homo sapiens
  misc_feature [331]..[331]: Chromosome 7, SNP identification no. = rs10486819
  misc_feature [331]..[331]: allele = g, in linkage disequilibrium with rs2040901, respectively
  misc_feature [331]..[331]: n is a, t, c or g
aagtacagaactatgaatcaaaagtcctaagttttcaaagatgctatcactttattataaattgatctcatttaattttcatccaaagtctagacattgctttattacacattttacaggtaaggtaatttggctcccagagattaactttgtctaaaaaattcattcttctattataccatcctacctcgtattaaatattgggtagaaagagggtaaaatattgagccctagatgaaaatataagcttgtattttatatgttaatcttgatatttaccatgtcttgtgatgtgcttctctatacagagttttaaatagtagcttggatngaaaaaaatctgagcaaagaaaaggaagaaaggaaggaaaagaaagaaggaaggaacaaagggagggagggagggagagagggaggaaggaagagcaggctagagtgagatttatggacataccagccagagtttgagagaattatgagaaaagacatgactatgataacttataaataaaatgaaagaaggaagttgacaaaggtaagcctgaaataataaaatatgtaaaggaataatttaaacacactcgatattttgtaatagtttatgaatagagcttgtgttctaccacatcctggcttatgagctgagcatcatgcactgctt

SEQ ID NO: 3414 - DNA, 661 bp, Homo sapiens
  misc_feature [331]..[331]: Chromosome 7, SNP identification no. = rs10486820
  misc_feature [331]..[331]: allele = a, in linkage disequilibrium with rs2040901, respectively
  misc_feature [331]..[331]: n is a, t, c or g
agtttatgaatagagcttgtgttctaccacatcctggcttatgagctgagcatcatgcactgctttcattcagttccacgcagatgcagcatgttgctttctttccaataccttcattgtctctacatgtgccttccagtgccctacgataaattctgggaaaatgtgagttccctggattattgaaaaagatggttgtctacaaagaataatttagcaaaatttagcaaaatcttgtgccaatggcaattatctgtcttattgggtagtccgtgggcaattgccaatgacaagtcctccccaagtcaaatagaacttctaacatactcantggtgtgaatggcactcacttggctgctgaatacatagcctgcaggttctagaaaaatttccttaaggcttcttatgcttggtgaaaataaaatttacttaaattgagattagggagtttttcaatattgatactacttttattcatgagatatattcaggtttggtttcctagtcctatgtaaatctagcccttctctctcttcctttatttataatctcagagtctggaaatttcttctaagcaagatagcaaaactcagaaaacatttggaaaagattggacaattctactaaaatgcaaagcaaataaagtaaaaaatctctatgc

SEQ ID NO: 3415 - DNA, 661 bp, Homo sapiens
  misc_feature [331]..[331]: Chromosome 7, SNP identification no. = rs7794553
  misc_feature [331]..[331]: allele = c, in linkage disequilibrium with rs2040901, respectively
  misc_feature [331]..[331]: n is a, t, c or g
cttccagtgccctacgataaattctgggaaaatgtgagttccctggattattgaaaaagatggttgtctacaaagaataatttagcaaaatttagcaaaatcttgtgccaatggcaattatctgtcttattgggtagtccgtgggcaattgccaatgacaagtcctccccaagtcaaatagaacttctaacatactcaatggtgtgaatggcactcacttggctgctgaatacatagcctgcaggttctagaaaaatttccttaaggcttcttatgcttggtgaaaataaaatttacttaaattgagattagggagtttttcaatattganactacttttattcatgagatatattcaggtttggtttcctagtcctatgtaaatctagcccttctctctcttcctttatttataatctcagagtctggaaatttcttctaagcaagatagcaaaactcagaaaacatttggaaaagattggacaattctactaaaatgcaaagcaaataaagtaaaaaatctctatgcggcaaaaaattacctacatagagttaacgattaacaagaaatttggaaatacactcacaactcagttaatagctattatgccaaaaaatctcatataactttgtttaaaattaccaataattaaatgacata

SEQ ID NO: 3416 - DNA, 661 bp, Homo sapiens
  misc_feature [331]..[331]: Chromosome 7, SNP identification no. = rs6969877
  misc_feature [331]..[331]: allele = t, in linkage disequilibrium with rs2040901, respectively
  misc_feature [331]..[331]: n is a, t, c or g
ttcatactaaattgtgtaagatacttccaaattgttcaacaaaatgtatataatacacacttatcttcctgtaaaaatcacattggaaaatctacactttaccattttaaagttgtcaatctcattttctaaattaatatttttactcaataggtgatatgatgatgtaaatttattgttgatttttcttctcttcactgtttaataaaaattttatcctaaagtatcagatgtgaaaggatggaatagttcagtatttagtagagcactgggcccataggaagaaatggggatcatctggttaaaaataagtgctgcctgcgagggtcangtgtaaaagaacaatgacatgaatatttaacacaggagtaggtaatccttggggcataaggtatgattttccaaagaggtggcctgtacatcattaacattttcagaataaatgtaaagtgagatgaggatagcaatcaacctggaatgtaatattttggaaaatactgaacatgaggaagaacgccttagtgtgtgaaaaaattcttgtcatcgagctataaggaattcccaaagatcttttttcctccagaaatgagatataaaagccatattgttaaataagtaccagggtagattaatggatttaatgaaggggtgaaaaataggc

SEQ ID NO: 3417 - DNA, 661 bp, Homo sapiens
  misc_feature [331]..[331]: Chromosome 7, SNP identification no. = rs6960200
  misc_feature [331]..[331]: allele = t, in linkage disequilibrium with rs2040901, respectively
  misc_feature [331]..[331]: n is a, t, c or g
ctccagaaatgagatataaaagccatattgttaaataagtaccagggtagattaatggatttaatgaaggggtgaaaaataggcaggcagggaaaataccaaaagatccagagatagaaactaatatacacatacttaaaggtagggttgctcataattataaatttggtgattagacttgatatgtaataggaagttctcattagtagcttccttttcttctttaagagtaattgaaagttgtaattatatgttacctttactgatcatttgggcttactctcttttttaaaggtccacataaaaatcaacaatatttagaaataccttnatctcttgctgcttcttctcatctccaggagacagtcttccttggcctcccaatctagcttcacatgcacctttactaagttcccatggaattataacatttatcatgctttattataaatctagattttttctgtatttttgccttctattcttattctttttttagcattttaaaattaagatatatttcacaaaacacaaaatttactcttgtaaaataaattagatttttagtacatgtgctatattgctcaagcactatctgattccagaacattttcatcacaccatggctattagcagttggttccaattcccccctggctcc

SEQ ID NO: 3418 - DNA, 661 bp, Homo sapiens
  misc_feature [331]..[331]: Chromosome 7, SNP identification no. = rs12707346
  misc_feature [331]..[331]: allele = g, in linkage disequilibrium with rs2040901, respectively
  misc_feature [331]..[331]: n is a, t, c or g
aatctagattttttctgtatttttgccttctattcttattctttttttagcattttaaaattaagatatatttcacaaaacacaaaatttactcttgtaaaataaattagatttttagtacatgtgctatattgctcaagcactatctgattccagaacattttcatcacaccatggctattagcagttggttccaattcccccctggctcctgatcctctggcaattactagtctattttctgtatatatagatttacctattctggacattttatacaattggaatcatacagattacagcattttgtgtctggcttctgtaacttagnataatatttccaagatttactcatgttatagcttgtaacactactttattctttgatttggctgaataacattcgattgcgtggatctaccattttttaaaatacattacattcatcagctgatagaaatctgtttatttttttccattttttggctttttgaattgtgctgctatgagcatacatgtacaagtttttgtatgaacatatgtttttaattctctaagtaaataccaaaacttagaattgctgggtcaaataggaattccatgtttaatattctgaggaaccatcaaacagtttttttacagtggctgcaccatttttcat

SEQ ID NO: 3419 - DNA, 661 bp, Homo sapiens
  misc_feature [331]..[331]: Chromosome 7, SNP identification no. = rs12707347
  misc_feature [331]..[331]: allele = g, in linkage disequilibrium with rs2040901, respectively
  misc_feature [331]..[331]: n is a, t, c or g
attctaataggtgtaatgtggtgtctcgctgtgattttgatttccctaatgttcaatatcgaatatcttttcatgtgcttattggccttttgaataccttctttgaaaaatgtgtattcaaatcttttgcccattaaaaaattgtatttattttttattttttggttgtaagacctatttttttctggatactaggcctttgtcagatatatttgcaactattttctcttattagggtttcttttcaccctcttgatagcatcctttgatatacaaaatatttccatttctatgaagtctttgattgcttgtgctttggtatatatctaanaaattgtttcttaatccaatatctcagaaatttccacctagattttcttctaagtgtgttatagttttagctcttatgtttatgtattttatccattttgagttaattttgttatggtgtgaggttggggtctaaattcatctttgcaggtgatatccatttgttaaaagactattattttccaattaaatggttgtggcaaccctgtcaaaaatcaactgaccataaatttatatatttgtttctggactttcaaatctatcccattggtatatatatatcgatccttatgccagtgtgttgattactgtagctatgtcttatgttttg

SEQ ID NO: 3420 - DNA, 661 bp, Homo sapiens
  misc_feature [331]..[331]: Chromosome 7, SNP identification no. = rs7790064
  misc_feature [331]..[331]: allele = c, in linkage disequilibrium with rs2040901, respectively
  misc_feature [331]..[331]: n is a, t, c or g
agttgcatttttgacagggattttttgaatctctatagattcaaaaatctatagagattccaaaaatggcaataaggaatattgccattttaagtttattatgtcttccaagtgcatgaacattggatgtttttccatttatttagatcttgcttcattcttttcaacagtattttacagtttgtagtgtacaagtcttgtacttccttggttgaatttactcctaagtattttattcatatgactgctgctttaaatggaattttttttaaattttatctttggattgtttgttgctagtgtataaaatgcaacttttaaaatactaatnttgcattctaagactttgctgaactcacttattagctctgtttgtgtgtgtatgtattctttaaagtttggtgtatataacactatgtgatctgtaaatagagatactttcgcttctttcttttctatcaggatgacttctatttctatttcttccctaatagccttagctagaaaatccagtactatgttttcatagaagtagtgaaagtgaacatccttgtcttgttcctaatctttagggaagaactttcggtttttcaccattaagtatgactttagctgtgagttcttaataagtgcaacttaccttttgagaaagtttattcta

SEQ ID NO: 3421 - DNA, 661 bp, Homo sapiens
  misc_feature [331]..[331]: Chromosome 7, SNP identification no. = rs16887102
  misc_feature [331]..[331]: allele = c, in linkage disequilibrium with rs2040901, respectively
  misc_feature [331]..[331]: n is a, t, c or g
tcaggttgtgcaatccagattaaaaaatagctcttcattatatgtaattatacgcaaaataatgtttcaatggattaggatggttaagatataacattatttacccccagtattttaattcctaaaataataattctcatgagggtgacacattatccaggctgccattatgtattgctctcacactggctattagaaaacataaccagttatatagctaagtttgtgttcataaatatttctaaagtctatttatatgtagcatgaggtcaacctaataggaaacacaagaaaacatggccaattattgaatgctgaaaaaaggcttaanggcatattttagcagaaaaaatagctattatcacgaaacatacacttttttaaatactctaataaagagtttgaagagaaagtttagaggtagtaaatgtaataccaataatattgtgttttatatttcaaatgaccatcatcctatgcaattgaaaacattggtgaagaaagtcttgggagttctacaaacatcccaaagtaaatctatttgttatttaccaatcttggtaaattttaaactaatatttggattaaatatttatttattttttactgggaaagaagaacaacttcagtatcacagagacccttatcaatcccaataata

SEQ ID NO: 3422 - DNA, 661 bp, Homo sapiens
  misc_feature [331]..[331]: Chromosome 7, SNP identification no. = rs17155064
  misc_feature [331]..[331]: allele = t, in linkage disequilibrium with rs2040901, respectively
  misc_feature [331]..[331]: n is a, t, c or g
ctttaatatgaggatagaggattaatctaattgttctaaacattgaatgtaattgaatatggagaaaccatactctgacattgcctcacatagagttgacacacaataaattggatatgcattttcaaactagaacaatatctatcatttttagattttttgtatgtgaattttctgatttagattaattttttaatatgtaataaataatatttagcaattttatttttgtgcatttttccctgaaaaatggataaaatgtgaaacccataaatgacatagaaggaaagatggtatttgccaagaaggaaaaaaaagggtagttaaatantcaaatgcaattgtgattagcatctggacaccatgcctgaataaaaataattttaataaatatatttggaaatactataacatacaaatatttggaatgtggttatttccaatgttttatatataattaaagtctgcaagtaaaaataaataaccatgaaataaaaatagcaccaaaaacatggatgaggtctgattttaattataaacgttgtaaacttttgtgtaaattttttataagcgaatttaaccatatttactatttgtttgaaaattcctattttcctaacaacagaggactgcatgctcttaaatcaaagcataaaatcat

SEQ ID NO: 3423 - DNA, 661 bp, Homo sapiens
  misc_feature [331]..[331]: Chromosome 7, SNP identification no. = rs2040901
  misc_feature [331]..[331]: allele = c, g
  misc_feature [331]..[331]: n is a, t, c or g
ctgatgtaggacctttcattggttttcactgtacaatgggtaagctcttcttattatcataattaatcctgtgatttgctatgttagaaggcttaaatcactgaaatgtaatttccaccatcacaaatagtggcctagattttatgatcaagggaatacatggcatgcataagtagaatgctactatgcatcctggaatccactgtatttcattatacttatattctgtcttactggcagtcttgggcaagcctaagtacacctttattaacaagtcaataacatagctctgtgttaagcttttgtattgatctaatatggttcaccctgntatgccaaacaggtccacatttcaaaacaacctctttcttaactgtctctgatcttgggagtctcatgtgtaaagtaatagaaacatttctggttttagcaatgtaaaggtcacacctgccacaatgaggaagcagtatcttgttttatgcgtatgagagccagaagcaggaaggcatggccagcatcatgactaacccattgctttgtttggtagagccacctttttccttctggatcccttgcatcttgggtgctttttttatatgtactgcatgtccttcttgtgttcaattttgctgctagctaattcctgacaatggcttaaact

SEQ ID NO: 3424 - DNA, 661 bp, Homo sapiens
  misc_feature [331]..[331]: Chromosome 7, SNP identification no. = rs1014079
  misc_feature [331]..[331]: allele = c, in linkage disequilibrium with rs2040901, respectively
  misc_feature [331]..[331]: n is a, t, c or g
ggtatcacaacatcttaggatgtaggctgataacagtattaagctcagtttaataaaatcaattctattagaggataccaaaaagatatgtttttacaagattctttcatgatttgagtgctttctacttatggtcaagttttatttattaaagaatgaggcatttaagctgaacacattcttcaacaaaaggctaccttatttctggaagcagatatactaccagctgtgtggccacagctgactcattcaacattccttaggttcagcttctttgactttaaaataattttcataacctgaaactgacagctacgttttaatgactagntatcataacatatatggtgaaatggactatttctatttcttctctttagagtagaaatgtgaacctcattcagcaaaagttttgtttgtacttgtcttatgtatatgtctatagaagcagcattctaagaaatatttagagtaattggttcaattgttgattggcatcattgtattatgcagtttgtctatgaaatatgcatagtcttaactcatttattttatagagtggttccctgtgttctggtaaaagctttattttcaagacttctttataaaataaaaatgtaaagaaaaacctagctgtaagacaatgtagcttttgaggccc

SEQ ID NO: 3425 - DNA, 661 bp, Homo sapiens
  misc_feature [331]..[331]: Chromosome 7, SNP identification no. = rs10230536
  misc_feature [331]..[331]: allele = t, in linkage disequilibrium with rs2040901, respectively
  misc_feature [331]..[331]: n is a, t, c or g
agattgctgaggccaggagtttgaggccagcttgggcaacatagcaaaacctcatctcaaaaaaatatatatgcttgaaggaaaattatacagatgatgtaatatctaatttattagaaggtggcaaatcaccagcctaagtaacaatggatttcttaaaaagtagtagatatttgtctttaacatagattgttatctttatctttattattttcttattttaaggtgtgcttcccttaaaaaatcataacaatattttaaatatgttcagatttcatattataaacttcattttataataatgtcatgtaacttttagattgacataagnacgattgtttattgtattagatgttctgttttaatctgttttcatgctgctgataaagacatacctgagactgggatattaacaaaagaaagaggtttataggacttacatttccacatggctggggaggcctcacaatcatggcagaaggcagggaggagcaagtcacatcttaagtggcagcaggcaaaaaaagcttgtgcagggaaactccccctgtttaaaaaccatcagatctcaggagactcattcattatcacacgaacagcacaggaaagacccacccccataattcaatcacctcccactaagttcctcccatgacatgtg

SEQ ID NO: 3426 - DNA, 661 bp, Homo sapiens
  misc_feature [331]..[331]: Chromosome 7, SNP identification no. = rs6467702
  misc_feature [331]..[331]: allele = g, in linkage disequilibrium with rs2040901, respectively
  misc_feature [331]..[331]: n is a, t, c or g
ccagctactcaggaggctgaggcaggagaatggcgtgaacccgggaggcggagcttgcagtgagccgagatctcgcagctgcactccaacctgggcgacagagcgagactccatctcaaaaaaagaaaaattgaaacaaaacaggggtgaggaacagtgaaaaatctctaggttctggaagagtcaaggcaattgttagcaaaatctatgttatgaccatgggagtagatacgggaggaaggtcattggcagagaggagtcaggaagtgttgatagaacaggcttgaaagaatcacttccatatatagagaaatcatcaaggacatgtatngggctgattaagacaggaaataattgttgatataaagatcaacaattagtgggggctttccaggagaattgcaggctctgagggtccctgcttcagttacattccaatgacaaaggtcaggttgtggagggagagcagcactgagaatatgagcatctacatagaaccattaaaattagaatgaattattaataaatgcatatgtgtcagtgtatagattgatccatattctaatttttgctttttaattttatttcccacaaaattatgtagaaacccttcattaaattagatttataattcttatgtatttctttctttttggggggg

SEQ ID NO: 3427 - DNA, 661 bp, Homo sapiens
  misc_feature [331]..[331]: Chromosome 7, SNP identification no. = rs2285541
  misc_feature [331]..[331]: allele = g, in linkage disequilibrium with rs10244551, respectively
  misc_feature [331]..[331]: n is a, t, c or g
actattttgctaccatgggccattctcatcaatattttcccacaaagctttatatttgaagtctattgcaagtaagtatatccttgtttttgttcatctatctgtttatttttaggaactgaagatgcttatgaagtcattagtatcatggactgtaaaaatcaaacactgtgtaattctcagaatacaactagacactgctctcatgggaaggagattgaactatgtgtcttgcgtcttggaaaaaatgcaaagcgactcactaaccatgaagaaacagcaaattaggaagacaggatgatcaatttccttgtcttattaaaaaataaantctgctttcttttctctctccttttattctctagtgacacatttatttattgacagtttggacaaaagtttatcaaggaacttttcacgcttaggatgaattacaacaagaaccaacatttctttagttccagcaggtgagagaatacatacctgagaaaccaaaagaatagctgtcctgtttgggttgtaggggaaagttttgggaattgtgaagtaaaggagggaaggatctgggatgacaattacagtgtgagatacattgataagggcagatgtgaaaagaggttatcaggttttactgtagattacaaatggagttttccctcag

SEQ ID NO: 3428 - DNA, 661 bp, Homo sapiens
  misc_feature [331]..[331]: Chromosome 7, SNP identification no. = rs10249203
  misc_feature [331]..[331]: allele = a, in linkage disequilibrium with rs10244551, respectively
  misc_feature [331]..[331]: n is a, t, c or g
agctgccccaactggccaacaaggatggtcagagttctgcccagctgagattgctggttagtagtctggcctagccacagagcccagactataaccacaccaactagcagagcacagcctatagccctgcctgacaaagaagcctggccagtgacccttcccatccaaggaacacagttagcagccctacctaggcaagggacccaaccagttatgttgctcaactttgaggcacagactatggccatgcccaattgcagtgtccagccagtggctctgcttgaccacagagcatagctaatagactcacctgaccaaggaccccagccantaacccccacttgacctcataacacaggcactggccctgcccaatcagagactctggcagcaagcctcatctatccatgattactaccagatggcctatcccactccaggctgggatgactcatgaaggtcttttccgaatgaagtaaacttataaagtctggaagagggaacagcttagtcaaatgcatagacaccaatgcaaggatgcaagcatcacgaagaatcagaggaacatgacattaccaaagaaaacaaataaagcttcaataactgactctaaagaaataagtatctataaactgactggcaaagaattcagaataaccct

SEQ ID NO: 3429 - DNA, 661 bp, Homo sapiens
  misc_feature [331]..[331]: Chromosome 7, SNP identification no. = rs10278994
  misc_feature [331]..[331]: allele = c, in linkage disequilibrium with rs10244551, respectively
  misc_feature [331]..[331]: n is a, t, c or g
agccctacctaggcaagggacccaaccagttatgttgctcaactttgaggcacagactatggccatgcccaattgcagtgtccagccagtggctctgcttgaccacagagcatagctaatagactcacctgaccaaggaccccagccaataacccccacttgacctcataacacaggcactggccctgcccaatcagagactctggcagcaagcctcatctatccatgattactaccagatggcctatcccactccaggctgggatgactcatgaaggtcttttccgaatgaagtaaacttataaagtctggaagagggaacagcttagtnaaatgcatagacaccaatgcaaggatgcaagcatcacgaagaatcagaggaacatgacattaccaaagaaaacaaataaagcttcaataactgactctaaagaaataagtatctataaactgactggcaaagaattcagaataaccctattaaagaagtttgtaactacaagaagacacagataggcaactaaacaaaattaggaaaacaatacatgaacaaatgaaatgttcaacaaagaaagctgaagaacggaattcttcaactaaaaagttcaataaagagctgatagactcaggcaagcagaagaaagaatcagtgaacttgaag

SEQ ID NO: 3430 - DNA, 661 bp, Homo sapiens
  misc_feature [331]..[331]: Chromosome 7, SNP identification no. = rs1989835
  misc_feature [331]..[331]: allele = a, in linkage disequilibrium with rs10244551, respectively
  misc_feature [331]..[331]: n is a, t, c or g
aatttattttccccttgctctttaaaaatgaatgtttatgtacaaattactatgtatatatgctaagatgtaggcataaatggtatagtctagagttgttaaaatgtgttttacctaaatagttgttccaaggaagaagttaactataatatttattaaaccagaaatttgctgtgcttactttagctaatatcttttcaagattgtattcctaatgtcaagagttttgcaatagaaaattaaaattctgcattgttatttttaaaacaagcatttttccattccacttccattatattcccttttccattcaaataggctgctaattccnctactgtgaagagtgcttcgttgaacgtatgcatccatgtgtctttatgacagaatggtttatattcctttggatatatacctagtaatgggattgctgggttgaatggtaattccgcttttaggtctttgaggaatcaccacaatgtcttccacaatggttgaactaatttacactcccaccaacagtgtgtaagcattcccttttgtccacaacctcgccagcatctgttatcttttgactttttaatagtagccattctcactggtctaagatggtaattcattgtggttttagtctgcatttctgtaatgcttagtgatgctgaga

SEQ ID NO: 3431 - DNA, 661 bp, Homo sapiens
  misc_feature [331]..[331]: Chromosome 7, SNP identification no. = rs11761491
  misc_feature [331]..[331]: allele = t, in linkage disequilibrium with rs10244551, respectively
  misc_feature [331]..[331]: n is a, t, c or g
aggaaagacccactcccatgattcagtcatctcccactgggtccctccacaacatgtgggaattatgggagctacgagatgagatttgggtggggacccagagccaaaccatatcatatatgtagatatgaagataaatattctggttccacttacccttgtaaattaggttttcaaagtagttctgatactcttaaagaagttaatgataattagagtagattccctgaactgagtcttgaatgggttcaatgtttgtcatttgaaaggacttgagtaaagaaattacagaaatgtgaatgacattgattggtctaggttcttattgggnggaggatggtggaaaagttttcaaatttacataaggcctgatttggagtgtgttgaaaactaagcagagaggtttgggtttgatgcatcagaaaatactgaaaacttttggagaaatttaaaagtgctgaaaagcaatatttaagaaaggtggccagatgtggtggcccacacctgtaatcccagcactttgggaggccaaggtggatggatcacctgaggttggaagtttgagaccagcctgaccaacatggcgaaaccccgtctgttctaaaaatacaaaattagctgggtgtggtggctgttgcctgtaatcccagctgcttgggag

SEQ ID NO: 3432 - DNA, 661 bp, Homo sapiens
  misc_feature [331]..[331]: Chromosome 7, SNP identification no. = rs756867
  misc_feature [331]..[331]: allele = t, in linkage disequilibrium with rs10244551, respectively
  misc_feature [331]..[331]: n is a, t, c or g
cagtctaagcagcctgaagggtgccaggatcctgggttatacttctttcagtcagaggctgtggcctctttagtaactgtctcagcagacatataagtgtccacagctggccaaagagaatactgctatcccaaacccataatgggagagggtgtcctttttttgtgaggctaacaggagtattgtggttcttaccagttgctaccagatgactcagttattctactctttgcctcatctcaatatccatgttattcaaaatccaaaccaacacttacatcatcatattacattgtgatgattaattctataggccaacttgattgggtcntgagtgtcatgggctgctggctaaccattatttctcatcctcatgtgcctctgaggatgtttctggaaaaaattcccatttgaatgggcagactgagtaaagcacatgaccctccccagcatgagtgggtatcatccagtccattgagggcctgaatagaacaaaaaggccaaggaaggtttaattaactctgacggactgcttgatctgggacatcagtcttcctctgttggtgctcctggctctcaagtctttagacccagactggaatctatactattggctctcaggctctcagaccttggaactacatcaccagctttcctgggc

SEQ ID NO: 3433 - DNA, 661 bp, Homo sapiens
  misc_feature [331]..[331]: Chromosome 7, SNP identification no. = rs756869
  misc_feature [331]..[331]: allele = t, in linkage disequilibrium with rs10244551, respectively
  misc_feature [331]..[331]: n is a, t, c or g
ctgggacatcagtcttcctctgttggtgctcctggctctcaagtctttagacccagactggaatctatactattggctctcaggctctcagaccttggaactacatcaccagctttcctgggcctctagcttgtagattgcagattgtgaaccttctcagactccataatgcctgagcaacaacttaataaattccatcatatatatatatatatgcattatctcccattggttcaatttctctggagaaccctgaccaatacatacagttcataaattttggcatctagtcttctactagttaaattggtaatctaatgatcatcttttnaaaaaatccatgatatgatacattgagaatggaaatccaggcccaagagagagaatcccagaccttcttcagcctcagaaataaaagataggcttttaaggcctcagctgagagacatgaaaatattttttcattttaaatcctttagaatgtataaggtagaatactcaaaccctcagtgatcctttgtctgtgatgtgctcgggatgagcaagaaaaactgcactgcgaatcctagcaagcttttaactgtggcattgctctgaaaaaaattacgtgaaaggagttttataagcatttgattgacatcgattctcacaggaaagaaaa

SEQ ID NO: 3434 - DNA, 661 bp, Homo sapiens
  misc_feature [331]..[331]: Chromosome 7, SNP identification no. = rs10232659
  misc_feature [331]..[331]: allele = t, in linkage disequilibrium with rs10244551, respectively
  misc_feature [331]..[331]: n is a, t, c or g
atatggtaagtatatgtttaactttttaagaaactgtcaaactgttttcaaaaataggagtaaaggaaattgtttatacaacaaacatttcttcagcataaaatttaacttacgttgtttaaaacagttgattcttagggcagagtgagagggagcggggagattgttcacactaatgagtgttttagtacttttgattgacatgctaaagtttgcaccaatagatttttttcaaactatttcatgctaatgtgccaaatacaatctcattattcatccaaggcatccatttcattgcaaggctgtagcaaaaatatgtcagtcatttgtnctgcatcttcccttgtttacattgaggttaatggaaagatcattactaaaatatccatgtttggaatttcattacatggagaatttagtgatgtatacagattacttagttacaaatacagattaattgaaaacagggacctaaaaaaaaagatgtatttctggaagtacatacacatttccctagaatcagtaagtaaccgagtttgatacccaagctataggacacatagagagtttgatacaaacttagatacctgtaccaagctcccctttctgtatggggttttcctcctttaacaagaaaggagagggaaagtcattctgcctt

SEQ ID NO: 3435 - DNA, 661 bp, Homo sapiens
  misc_feature [331]..[331]: Chromosome 7, SNP identification no. = rs10269975
  misc_feature [331]..[331]: allele = g, in linkage disequilibrium with rs10244551, respectively
  misc_feature [331]..[331]: n is a, t, c or g
cacacaatcacagtggtaaagctaacagaaaggcatatttcagaattataactttcaatctaggcatgtatgcttaaagttggggatagatgttaattagaaaatccatattggttttcaaaccattaatacttatgacgactaaataaaaacagggaatgtatttttccacccggaagcaaaactactggaactataggcagacacacacacacacacacacacacacaccacacaatttgggccccaacggagtgtaagagcaatgatgactagatcatttttgaaaatccagtaaaactattatgtaaatgtggaagatgataatttngtaggttgactttttcacttttcttcaactggttatttttgtgttacttagctgcaacttgtgtgttggaaattaacacggtgatcagaagtataaggttatgaatgaccaatcagagagagagacaaaagagaaaagaaggaaaggaagaaactttttatgttggtccctgggaatggctggatgatctttttccccagcatctatttttcaagattatagtggctataaaattcactcagctgaggaggatgaaaatcattttttaatttacaagcttgccaagcagtttactaagcagcttagggggttggttgtttgtatttatgt

SEQ ID NO: 3436 - DNA, 661 bp, Homo sapiens
  misc_feature [331]..[331]: Chromosome 7, SNP identification no. = rs10270000
  misc_feature [331]..[331]: allele = g, in linkage disequilibrium with rs10244551, respectively
  misc_feature [331]..[331]: n is a, t, c or g
atgcttaaagttggggatagatgttaattagaaaatccatattggttttcaaaccattaatacttatgacgactaaataaaaacagggaatgtatttttccacccggaagcaaaactactggaactataggcagacacacacacacacacacacacacacaccacacaatttgggccccaacggagtgtaagagcaatgatgactagatcatttttgaaaatccagtaaaactattatgtaaatgtggaagatgataatttggtaggttgactttttcacttttcttcaactggttatttttgtgttacttagctgcaacttgtgtgttgnaaattaacacggtgatcagaagtataaggttatgaatgaccaatcagagagagagacaaaagagaaaagaaggaaaggaagaaactttttatgttggtccctgggaatggctggatgatctttttccccagcatctatttttcaagattatagtggctataaaattcactcagctgaggaggatgaaaatcattttttaatttacaagcttgccaagcagtttactaagcagcttagggggttggttgtttgtatttatgttctcagtcaatgatagaattaactttaattgtatataatgagatttgagagattttaagtgtaaaagcc

SEQ ID NO: 3437 - DNA, 661 bp, Homo sapiens
  misc_feature [331]..[331]: Chromosome 7, SNP identification no. = rs2905274
  misc_feature [331]..[331]: allele = g, in linkage disequilibrium with rs10244551, respectively
  misc_feature [331]..[331]: n is a, t, c or g
caagcctctttccccgttctctccccgaccaccccaaagccagagtcatttcatgcttcattctaggtatttagtcctgccacagatcgttttattttttcaaaataagtctgttctaaggagtggcctggaaatacaagtggaattacactattattttattctgattacaataatatttgttctggttagaataaactattctcttaggaaagacagggttaggagacaggaagttatcacagatgaaggaaaatgaggtcctgtgcacctagggaatgattagaaaaaaattaaaaaaggaggaaggaaaccaagtatgctttagaangaaaacaaactgggcttaacacagttcctatgtgtttggggttgtagggagaaggcaaagaatagtgaaataacacagatgaaaaagaagaatcggtcaaaattaggagagtgagaagacatataggtttttaaatttaattgactttttgatcttttaaaaaaaattttcagcctttttatcatagaaaactttaaacaaatgcctaagtagaaaaaagtatgtgcatgaacctgtaggtaggcactaccagcttcatgtctagtcttacggcatttataaccccccctcccttttctgccatgttactgtgaagaaaactctcagaca

SEQ ID NO: 3438 - DNA, 661 bp, Homo sapiens
  misc_feature [331]..[331]: Chromosome 7, SNP identification no. = rs2966487
  misc_feature [331]..[331]: allele = g, in linkage disequilibrium with rs10244551, respectively
  misc_feature [331]..[331]: n is a, t, c or g
ggttttgtattctgcagttttactgaatatatcagttctaataattttcttgtggagtctttaggtttttccaaaaataagatcatatcatctgcaaacaaggataatttgacttcttcctttccagcttggatgcctctcttgtctgagtgctctagttaggacttccagtgctatgttaaataatagtggtgacagtgggcatccatgtcatgttgcaaatcttagaggaaagactttcaatttttctctattcagtatgatattatatgtgggtctgttgtatatagttattacgttgaggtattttccttctatactgttttttttngggggggagagggggatttatcatgaaggaatgttgaattttatcaaatgttttttcagcatcaattgaaatgatcatatggtttttatccttcattctgttaatatgctataacacattgattaatttgcctatgttgaaccatccttgcttctcagggataaatccctcttggtcatgatgagtgatctttctaatgtattgttgaattcagttttctggtattttgctgagaatttttgcatcaatattcttcagagatattagcctattcttttttgacgtgtctttgtctggttttggtatcaaggtaatactggccttctagag

SEQ ID NO: 3439 - DNA, 661 bp, Homo sapiens
  misc_feature [331]..[331]: Chromosome 7, SNP identification no. = rs10244551
  misc_feature [331]..[331]: allele = a, t
  misc_feature [331]..[331]: n is a, t, c or g
cctgaggaacctgctgccctccaggcctgtgtttgctttctcattcactagttttaaaatggaaccaggacatttaacattttaagttcacctgtgattttgctgcctgcaacaatttgagaaccaccagatgaggaggctgaaaaggagggggagagtaggtcagaaacaaccagaaaggcttggcaatgacacagtcaggtgatcgtcacttactgtgcattatacactctctacttgtttttactcttcccttttccaggtaggaatgttccatctctggctagattcacctggaaatacagaaggaaagctaattgggaatggcttnaaaaaatcaggatttagactaagaacagatgtggctcttatagtggtactcagtgatagcaccatcccaaacaccggggctggtctagattgtctttctggctttttttttttttttttttctgctgatagaaaatgcaaaccttgattgacatatgagctggttaggttgcttctcacgcgtatctgcatgccctgtgacaggttgattagaactatttagcttgacttgatttatctggttcagcctcacggggatatttcagattgcattgaagtggtcctggtgctaaagcagaggccatgctttgctgtgggaaagctggctgga

SEQ ID NO: 3440 - DNA, 661 bp, Homo sapiens
  misc_feature [331]..[331]: Chromosome 7, SNP identification no. = rs10216230
  misc_feature [331]..[331]: allele = g, in linkage disequilibrium with rs10244551, respectively
  misc_feature [331]..[331]: n is a, t, c or g
cagtggctatctgagcaagaggtcttcattcggagcctactgggaagaatcatagaagtaagaaattcacatctcttgttcttggtaacatgatagagcattatcaacatttgatatttttgtctgccatccacactggccccaatcaacagcagtctggaaaatccccgaaagagtatgtataaatttctttctttagggtcttaaaaagcccaagggcatggcctaagaaatgtgaataagttttccactcatctactgattgctttctgaccagattatgtgttacacagaagtccaatttaatgaagagaaaggtctcatgcttagnacagtgaggatctacttctcactgtggtattatggatccaatactctgaaaagccatccagctgaaacacgcatagatcctgaacaacaaacatgttttttaaaatggctgcgtttgcaagaaagtaaattcctaagagccaaaatttaaaactagactgaaatcagggctgcaagtgaacatagaagactggccttccctagggcagatgctgatacctagaatctagagctttggggtttatactcactaagaaaattaaagggcaggccttgtgcctatgcaagacaaggaaatagagcctgggatgcaaatataatgtcaaggcct

SEQ ID NO: 3441 - DNA, 661 bp, Homo sapiens
  misc_feature [331]..[331]: Chromosome 7, SNP identification no. = rs10215501
  misc_feature [331]..[331]: allele = a, in linkage disequilibrium with rs10244551, respectively
  misc_feature [331]..[331]: n is a, t, c or g
atccacactggccccaatcaacagcagtctggaaaatccccgaaagagtatgtataaatttctttctttagggtcttaaaaagcccaagggcatggcctaagaaatgtgaataagttttccactcatctactgattgctttctgaccagattatgtgttacacagaagtccaatttaatgaagagaaaggtctcatgcttaggacagtgaggatctacttctcactgtggtattatggatccaatactctgaaaagccatccagctgaaacacgcatagatcctgaacaacaaacatgttttttaaaatggctgcgtttgcaagaaagtanattcctaagagccaaaatttaaaactagactgaaatcagggctgcaagtgaacatagaagactggccttccctagggcagatgctgatacctagaatctagagctttggggtttatactcactaagaaaattaaagggcaggccttgtgcctatgcaagacaaggaaatagagcctgggatgcaaatataatgtcaaggcctgttgaaagagctatgacttcaatgaaataatgagttagaaaaaaatctgacaaagcagcaaaaggcagctaagaggagattgtctgggttgctgcactgggtggaaaacaacaacaacaacgaaaatc

SEQ ID NO: 3442 - DNA, 661 bp, Homo sapiens
  misc_feature [331]..[331]: Chromosome 7, SNP identification no. = rs1922898
  misc_feature [331]..[331]: allele = g, in linkage disequilibrium with rs10244551, respectively
  misc_feature [331]..[331]: n is a, t, c or g
aatgggtggaaagaaatcaggaaaattggttacagcctaaaatgcaacatgatgctgaaatgtcaatggaagatacagatttaatgttttaccctttccagctatcatataaagatccaagttggacaaataggataaatttttagtggggaaggcagttccatgctttttatgactctactactttctctaccttttattccttctttcagtccttctggaagaagttctcctatttctcacttttctgaatgcacccagagcagaaagagatttgtcaatctcctgtatacacttatagtgaactaaatttattgtgagaaaagaaaanattgcctttacatattgtgttatcctttttacataaacctgggtgtcatcagaatctttgatatattactaatctaatgagctttgaatctatatatttcatacttaatttctccttaataaaatgagatcctttcatagtatgacagttgctaaaaatacaaatccacagatgaaatcaaatcatctatctttataagaattaattccaaaatgtaacttacttgtcctatccatgtctcaatttctctaaaaaaatttgcttattataatgtaaactgacttaagtggccaatacaaattgtcaccaaaattgagtaatcaaaagtca

SEQ ID NO: 3443 - DNA, 661 bp, Homo sapiens
  misc_feature [331]..[331]: Chromosome 7, SNP identification no. = rs1922897
  misc_feature [331]..[331]: allele = a, in linkage disequilibrium with rs10244551, respectively
  misc_feature [331]..[331]: n is a, t, c or g
ttaacagctctctgtaacaccaaatgcgatggccaaatcacttaattatcattctcgccattatgtgggaaacccagtgtagtgcatattctgaaggggtcttgaaggcattcaggtcccagcatttccattgcagcattcattttggatctgtcccattggaatactaagcctctcatccgtacggtatcatttctctacgccaactcttttattcaagggaaatgggtggaaagaaatcaggaaaattggttacagcctaaaatgcaacatgatgctgaaatgtcaatggaagatacagatttaatgttttaccctttccagctatcanataaagatccaagttggacaaataggataaatttttagtggggaaggcagttccatgctttttatgactctactactttctctaccttttattccttctttcagtccttctggaagaagttctcctatttctcacttttctgaatgcacccagagcagaaagagatttgtcaatctcctgtatacacttatagtgaactaaatttattgtgagaaaagaaaacattgcctttacatattgtgttatcctttttacataaacctgggtgtcatcagaatctttgatatattactaatctaatgagctttgaatctatatatttcatactta

SEQ ID NO: 3444 - DNA, 661 bp, Homo sapiens
  misc_feature [331]..[331]: Chromosome 7, SNP identification no. = rs11773501
  misc_feature [331]..[331]: allele = a, in linkage disequilibrium with rs10244551, respectively
  misc_feature [331]..[331]: n is a, t, c or g
cctcccacagacgggggtcacctgaccctcttgaaactacaaagcctgcctcccataatccccggatgttcaatttcccattgcaacccccgagtggccccacatggcatgtggtgtcctcctcccctaagctgtgagtatatgtgactaataactgctgttgatctcatctgtccagtgtcaggtattgtgtatctatctctagaatcctaggacaagaatgcctccctcatcagtgagataaataggagacaacaaaaacatttttgtagactcccgttatgaggctgagaaagtatacatctagttctagtttgtttttaatcatganttgatgttaggctttgttaaacagtttttctaaaaaaaaatctgagataatcatgtcattttttgatctaatctttgaatatgcattaattgattttcatttgttaaccaagtttgcattcctgggataaatcccatttgttcatggaatataattcttttcgtatgttgctggattcaatgtctaatgttttttctggatttttgtgtctatgtttattttggtctgttttctctttactagtgaagtctgtatctggctttagtatcaaaatataaataacctcttagaatgagttggggacttttccttagtcatttttatttcttc

SEQ ID NO: 3445 - DNA, 661 bp, Homo sapiens
  misc_feature [331]..[331]: Chromosome 7, SNP identification no. = rs10234058
  misc_feature [331]..[331]: allele = g, in linkage disequilibrium with rs10244551, respectively
  misc_feature [331]..[331]: n is a, t, c or g
tcagagtttctaattatagtttttaaatagtctctttcacctttgaattttgtcagttttaacttcttctgatatgaggctcctttgtttgatgattataaattaaaatttgttttactttaataaaattgactcattattaaatgttcctttttatctctaatagtatcattttgttttatattaatatagccactccaactacattagtatccttttatttacatccagttgtgtcttggattctgtattgtctcttttgatagcatatagttgaatattgctatttaaatctgatctgaaaatctctgccttttaattagaatgttantgcacttactgtaatttatttgtttcattggacctgtggctgccattttgttatttgttttttagatatgttatgtttttttttatctgttcctcttttatggccttctttggtgtgaaaaaaattttttagtgtataattttaattcctctttcaaattcttaagtatgcttgagttattttcttagcaattctgctggggattactatatgcctcataatttataattgtctacatcaggttaatacagacttaattacagtaaaatataactttgctttaatatagctttgtgctgttattgtcataatataacaatttataatata

SEQ ID NO: 3446 - DNA, 661 bp, Homo sapiens
  misc_feature [331]..[331]: Chromosome 7, SNP identification no. = rs1614000
  misc_feature [331]..[331]: allele = g, in linkage disequilibrium with rs10244551, respectively
  misc_feature [331]..[331]: n is a, t, c or g
tatacaaaaaccagaaaaacatcaataaatgacaggagtaagtcctcatctatcagtaataaccttgaaagtaaatggattaaattcctcatttaaaatatatagactgactgaatgaattaataaaaacatgacccaataatacgctgcctacaagaaattcacttcactgtaaacacaactgaaagtgaaatgatgaaaaagatattttaggcaaacagaagccaaaagtgagcaggagtagcaatacaaacagacttcaactcaaaagctgtaaagagacaaagaaagacattatataacaaagggatcactttggaaagaaaatgcnacaattgtaaacatacatatacccatcaccagagcacccagaaatataaagcaaatattctatctaaagggagagatagacccctatacaacaatagtcagggacttaattcaacatcccactctcagcattggatagattaccaacacagaaaaatgaacagtgaaacatcacatttaaattctgtcatagcaaggaggagttcgtaccataccttttgaaactattccaatcaatagaaaaagaaggaatcctccctaactcattttatgaggccagcatcatcctgataccaaagcctagcagagacacaacaacaaaaagagaatt

SEQ ID NO: 3447 - DNA, 661 bp, Homo sapiens
  misc_feature [331]..[331]: Chromosome 7, SNP identification no. = rs10273589
  misc_feature [331]..[331]: allele = t, in linkage disequilibrium with rs10244551, respectively
  misc_feature [331]..[331]: n is a, t, c or g
catagtgtttgtgcagtaaccccatgcccagctgcaagacccttgctccagtgctgcagctccagccaggagtgcacgttctgcatttccgggctttcttcatttttaaaatgcttttttcttttctttctttccttctttcttttgttcacttgtaatatttcaaaatacctgccttcaagttcagaaattatttcttctgcttggtctagtctgttgttgaagctctggattgtattttgtcatttcattcattgaattcttcagctctaggatttctgtttggctcttttttaatgatatctgtctttgttggatttctcattcaaanaattactttcctgatttcactgaattgtctatctgtgttctcttgtatctcactgagtttccttactattatttagaattcatttttggcatttgacatatttccttatgattggggtctattactggagacattgttttcctttggaggtgtcatgtttcctttctttttcatgttcaacatgttcctacattgatttctacatatctggtggaaaaattgcctcttccaattttatgaagtaggtttcatagggaaaagcttatttgtatgaatgggtcttggagtgttggccttggttctgggtggacactgtagtgtagtctccat

SEQ ID NO: 3448 - DNA, 661 bp, Homo sapiens
  misc_feature [331]..[331]: Chromosome 7, SNP identification no. = rs1227163
  misc_feature [331]..[331]: allele = c, in linkage disequilibrium with rs10244551, respectively
  misc_feature [331]..[331]: n is a, t, c or g
tatctgctcctgcagttgctttatgtttcctttttgcctttttagccacctaactaacaactttatacctaattaacaattccttatgttatattttctgttaaataagtagtgtgactactatatcccgacaggatcttaatggctacaatggatagaggccatgtctcttattatcttcacttatgtgaagcagtatgcctcctaagatagtctaacactctcttccagagctattaatacaaagatcttcccatgatagtcaatttttgttaaagtttctccaaccacactggaagcaagaaaaaaattatttttttaaaaaagtttnttttaacaaggaggcaagtaagacattcttttattcccttttttatttttggcaaaatatgcttattgtaaaaattgtcgtttgctcttttttatggtgtaaatgaactttgttagacctatgactgcatgcattatatatgggtcagaaaagccagactctaggtctaatttttctatttgttagcttggtaaataaaatgaagatggtggtgctagcagcttaaaaactacacccaatgggaagtctggattatttaatgatttactactggaaaattaaaaataaatttaaaagaatgctagaaagatcacaagttctataaagaga

SEQ ID NO: 3449 - DNA, 661 bp, Homo sapiens
  misc_feature [331]..[331]: Chromosome 7, SNP identification no. = rs3734956
  misc_feature [331]..[331]: allele = c, in linkage disequilibrium with rs10244551, respectively
  misc_feature [331]..[331]: n is a, t, c or g
ttttttaagcaaaattttttcataaatctataaaaaggatatagtaatatataaatcccttggcattttcagaatttatatttgtggtgtccaccctcattttgtaaaagtccatgtcatgtgttaatttaaatggagaaaataaaatccactctagtctatagggttgttatgaggattaaatgagataacatagagtatttagtaagaatttaaatgtctggggctgaatgtttgcagattacagggttaatctttttgttagagcaggaagaatccagtgaaagtttgatattcccactaatgattggttcaattttgaagattcttnaaggcctcccacatatactagaattcttccaaatatacttctatgcctttaatgaaagaacattgccacttgattcgaacactcagttgaagagagcttaccatatgtggttagaatcaggcttcagagccagatcacccagggtggacccctccctttcctacttggtgatctcgggtgaattatttttaccttattttacctctctgcctcactttctcattcctaaaataagaataatagtacctccttgaaaggattgtgaaaaagattaaatgagttaacatatgtcaagggcttacaacagaggttggctgttagccaatggta

SEQ ID NO: 3450 - DNA, 661 bp, Homo sapiens
  misc_feature [331]..[331]: Chromosome 7, SNP identification no. = rs1227155
  misc_feature [331]..[331]: allele = t, in linkage disequilibrium with rs10244551, respectively
  misc_feature [331]..[331]: n is a, t, c or g
taactcaactccaacacacatcccactatgacagttagacacttaatagcataaagtttagtcatgatgttcaaatatatcctgagttcttaattattcaggagaaacagatggacattttgcaacaaacccttcttaaaaaaatccctgagatttattaagttacaaaataggtcttcaaaacaaatgtactaaacttagcctatagttctgtacacagctactcatattcaggaatttatggaggtgttacacatcctatattttccccatattgtggcccacactgcatatgcatttcaggtcctgcttggatctctgtttaattctnctaagaacatgcattcatttcttgttaaaagtatagttttcatttctgaaatgacttataatagaagacaatgtaattacattagaagacattttaatttgcaaattcatttccagctaagatttgtggaaaataaaatctaatttatgctaaagtatatcaaacctgctgatcaattctcttttagtgacttcccaggaagaaactgatgttggctataaggttagggttaagacacagcagttatctttcaaccatattgcttctgaaaagtaccaatctgtttttatgctgcagaaatgaagattgcattacctatttttcacaaaa

SEQ ID NO: 3451 - DNA, 661 bp, Homo sapiens
  misc_feature [331]..[331]: Chromosome 7, SNP identification no. = rs7780098
  misc_feature [331]..[331]: allele = g, in linkage disequilibrium with rs10244551, respectively
  misc_feature [331]..[331]: n is a, t, c or g
ttcttctccttttatgcctcttcacttattgttttaatgtaaatattctgttcttcaaagttttcatttatatatttatttatcagtataggcacattatttcctatattactcaatgggctatggtccattactgtaatttgttttgatactcaatttccccatctctggccactgggagttgtttcaaactaacttctgtgttttttttatttgtttcttatcattatttgaacacttcttcctttctaggactaacatattccaacctcaccttgtatttctgctgcctcagcaaaagtattcagatgtaatcagttatttctccaangagcccttattcctttcagtggagaataatattcagaagctaagatctgagatataggtatgttcattgctattggggactggtagtctcaggcccttttagtagacagatctatcaaatatatgtgaaaaaatacacacacacatggttacacatatttatatcaacattcatttctatatatacctgatactttatctttcaatccaacaccttagggatcattctagttttctccatttccatatttgcaatttctttcttcaacagaagaacctactccccatgatcttatttgtaagtccgcctttatgtagacaatctctcatc

SEQ ID NO: 3452 - DNA, 661 bp, Homo sapiens
  FLJ13576
  misc_feature [331]..[331]: Chromosome 7, SNP identification no. = rs7806781
  misc_feature [331]..[331]: allele = c, in linkage disequilibrium with rs10244551, respectively
  misc_feature [331]..[331]: n is a, t, c or g
aataaaagttgttactagttattagatctctattcagctgggctttcaagtcatggtcaaagtattcaatgtttcatatcctaaaatttttcagataacaggaacaaaatttctttatgcaatgtcatttttaaaatgtaacatttacataaacatatacggcttgtttgtttagaagcattcttgtatgagtcaccttatgcaaaccagatttggaaaacatacatagaagtctaaagaaagtaaagcccaactaagaaacagtatacgtaaatgcggcaatatataaatggagagactgtgagaaatccagctttaagaaaccacaggngactttcaaaactttgcttgtttcaggaaatttaagaacattatgaaggctactgtataattttaaagtcaaatgacttctttacgtggaagaagtagggcatagtggaaaggacccaagcttcggagttagacttttgttcaatcccagctcagccacttgctatgtgtacacgaataagttaattaaccttttgagtcttgatttctggaatatatacagagataatttatgtcatgagcttattctgtagattagaaatacatatgtatggcagtataaagttaaaagaaatgctttccacatgacccagcaatcccacatcacact

SEQ ID NO: 3453 - DNA, 661 bp, Homo sapiens
  misc_feature [331]..[331]: Chromosome 7, SNP identification no. = rs5020854
  misc_feature [331]..[331]: allele = g, in linkage disequilibrium with rs10244551, respectively
  misc_feature [331]..[331]: n is a, t, c or g
actacaagtcctaggcttgtatttgtttcactgcaactttagcttgttcaaaggcctcatcctcctttgtggaccagtcccagtgggcccccatcttgactagcagtatagggacctaaggagttgggccaaatgaggaataaaaggataccaacactgtaggaggcctaaggaagtttgcaagtgctttggtgtggtaggacatgggtaggcctacaccttatccataagagcagactgaaagaccttcgtcttacccaaccagatgacaaccagactgacaaacctggcctctggtctttgtatgcgttgactgccaatcctttgttcnccaagtgagagggtaaggtgggggctgtgcagattataagccagaaaaagacctaaaagttaatggaaaacatgtatcccctccagggtggtatccctgggcaagacagtccattgtttttcttcccatgtgaatgcaaattggtcttgactctctgagggcgatgggggatgccgaaggcattggctatcaatagccaaatggtatatgcccatggcttctcctacccttgtcccaagagaggtgatattgagaacagccacatacactggggggaccaccttacttaattcctagtaatctactgttattctttgtgtcccatcaggc

SEQ ID NO: 3454 - DNA, 661 bp, Homo sapiens
  misc_feature [331]..[331]: Chromosome 7, SNP identification no. = rs4329201
  misc_feature [331]..[331]: allele = c, in linkage disequilibrium with rs10244551, respectively
  misc_feature [331]..[331]: n is a, t, c or g
tcctacccttgtcccaagagaggtgatattgagaacagccacatacactggggggaccaccttacttaattcctagtaatctactgttattctttgtgtcccatcaggcttctgcatgggccattcagggctgttgtatgggctgtgcactggccttatagtgcctgcccaggctaactcccatatagtctctgtgatttcatcatgtccccacccttgcaggtggtattgctcagcacctctactcacggcagggctggaaagtgtcctggtgtccattttgcattctctgatcacagggttcaccacctaactctccgtcagaattccnctgcagttgtttgtggggtcaggcctgataagttatctactcccaagatgtattctgggatgggagcaaactataattagtctacaaaatgttgaccatttaaataaaaaattttctaatgtattagttgtaaaagtgcctcctatcacttcatatttttaattaatacacttagttttaatgtcttttatctgttctccatgtactctcaaaagtatctttttcaatgcgttccactggtttattttctctctgcctcactctttatctgttcattatttgtttatttatttatttatttattttgaggcggaatctcgttctgttgcc

SEQ ID NO: 3455 - DNA, 661 bp, Homo sapiens
  misc_feature [331]..[331]: Chromosome 7, SNP identification no. = rs1044262
  misc_feature [331]..[331]: allele = t, in linkage disequilibrium with rs10244551, respectively
  misc_feature [331]..[331]: n is a, t, c or g
gaactcttttgaactattttggtagtaccttttaccatactgtttgctttttgatttgggtaaatatcttaagagcaaagaaaacaatacaccaaatgaaaatgctttgaaagtaaatgaaaacagcgcttttgaaaggctggtatagtatgaccctggagtcagcctttgtgttacagcgaaaatgttggtgctataaattctgattgtttacagatgttgattctgcttatgctccaaagtgtgcatgatgtattttacgtagtactctgaggaagtctctttataaaacctactaccacttagtataaatttgtttgaatttatatcntttgttactgtaaattcagcttattccaattaggttggcacagatttaaactgatacacattccacaaaaaccaattcagtgtataagtattgaagtataagcagtcattgcagcttgatgccagatcatgtatgtaataacaagtggaagttaatagggccttctaatactgtatgggtactcctaagaattatttcattttggatataaagaagttatgaggcctcctgtcacattcacagctggttctccaaaataatttggttgtttcaaaaacaaatggtaatcatttggttggattcttcagtatcatgactagatcatgtggt

SEQ ID NO: 3456 - DNA, 661 bp, Homo sapiens
  FLJ31818
  misc_feature [331]..[331]: Chromosome 7, SNP identification no. = rs7781871
  misc_feature [331]..[331]: allele = a, in linkage disequilibrium with rs10244551, respectively
  misc_feature [331]..[331]: n is a, t, c or g
ctgtctttagaagatagatttgggtattttaaaatatcttcctatttctacttagctttttatacagttttgatttttttaaataataaaactgtattgaagcataacacatataaggaaagaatataaactgtgtaaaagtttagcttaagtaattttcccaaactggtattatctctattttaatgtccctgtttctgtgtcagttcagggttggtcattgttggctgatttatctcctcactgtgggtcctattttcttgctgctttgcatggctgtaattttttttggatgctagacatggtgaattttaccttggtgggttctacntaactatggattgctataaatattcctgaactgtgttctgggatgtagttaagaaacctggagacaatctgaagtttttgggtcttacttttaagatttgttacatgggactagagcactagtatttagtctaaggcaaattattctccattattgaggtaagacccttctctgtgtactctattaaatgtctgtgaatcttgaatgctccagtatggctgatgggaacaggtacaatattaatacttctctgtgtgactgctggccactgtaatctctaagccttttggacagtaccttatctagtctcatgtagttttctcatataca

SEQ ID NO: 3457 - DNA, 661 bp, Homo sapiens
  FLJ31818
  misc_feature [331]..[331]: Chromosome 7, SNP identification no. = rs7808616
  misc_feature [331]..[331]: allele = c, in linkage disequilibrium with rs10244551, respectively
  misc_feature [331]..[331]: n is a, t, c or g
atcacaatgagatatcatctaacaccagttagaaaggccattattaaaaagtcaaataacaacagatgttggcaaggattcccaccacacaattggtaggaatgtaaattagtgccacctctatggaaaatggtgaactaaaaatgtaactaccattcaatctagcaatcccactactaggtatctacccaaaggaaaagaaattatatataaagacacctgcccttgtatgttgatcacagcactatctacaatagcaaagtcatggaatcaacttgtatccatcaataaatggctaaatacagaaaatgtggtgtatatatgtacatanacatcatggaattctacgcagccataaaaaatgaaattacgtcttttgcagcagtatgaatggaactggaggccatgaccttaagtataatgactcagaaagccaaatacatgttctaacctgtaagtgggagctaagcaatgtgacaaacacattgacattgtttgtcaatgtggcaaacagagtgaaataatagacattggagaatccaaaaggtgggaggggagtgggggatgggaaactacttactgggtaccatttacactaaaagcccagacatcactacgcaatgtatccatgtaacaaaaatgcatttgtactccccaaatc

SEQ ID NO: 3458 - DNA, 661 bp, Homo sapiens
  FLJ31818
  misc_feature [331]..[331]: Chromosome 7, SNP identification no. = rs11768787
  misc_feature [331]..[331]: allele = g, in linkage disequilibrium with rs10244551, respectively
  misc_feature [331]..[331]: n is a, t, c or g
ttcagaatatggatggcaagaaaactcaacaagattcaagagaaagttgaaattcaacagaaaacagaaaaatgatccaggagttgaaagataatataaccatattaagaaagaaccaaccagaacatctggaattaaaaaattcactagaggaatttcaaaatacagttggaagccttaacagactagacaaagcagaagaaagaatttcagagctcaaagactggttcttcaaatcaaccctgtcaaataaaaataagaagaagaaaagaacacaaagccttggggaaataagggattatgtaaagcgatcaaatctacaacttactgncattcctgagagagaagagaaaacaagccacttggaaaacatacatgaggacataattcatgaaaatttcccccatcttggtagagaggttgacatacagatgcagaaatccagagaagtcctgtgagatactagacaaaatgaccatccccaaggcacatagtcactagactatccaaggtcaaagcaaaagaaaaaatctcaaagattacctataaagggaaacccatctggctaacaatagatttctgaggagaaatcttacaagccataagagattgggctcccgctccctgcctttttaaaacaacattcttaaaagaaaagaaa

SEQ ID NO: 3459 - DNA, 661 bp, Homo sapiens
  FLJ31818
  misc_feature [331]..[331]: Chromosome 7, SNP identification no. = rs11762737
  misc_feature [331]..[331]: allele = c, in linkage disequilibrium with rs10244551, respectively
  misc_feature [331]..[331]: n is a, t, c or g
gctttgcagagggagtgtgaaataactacgggactttgcactggaactccatgttgccctgtcacagtggaacacagcactgggcagaaatctactggtgcccacagggggcatttagaccatccttgaacagacagaaagaagtctgctgccctagtgggaggaatcttagtcctagtctgctttgctactggctgaataaagtggccctgggctcccaataaatgtcagtggcagccagaccatggcaactgtagtctttgggtgagccccagtgctgtgctggtctcagcagaggctgtgagcccagggtactacaaccaagtgtganaccagctgtggtggccatgggaatgcctccatcacccctcccctcattctaggcagtacagtgtagagacttcttccacttggggcaaggagaggaagagtataggagactttgccttgcaacccaggtaccagcccagccacagtaaaacaaagcaccaggcagaatcctaaagcccctgattccaggctgttgttcccacatggcacttctagacccaccctgggacagaagggaatcctctgccctggggggatggaccccaagtccctgcaggattcattacctgctgactaaagtggccttggaccttcagtaaacatcaatgac

SEQ ID NO: 3460 - DNA, 661 bp, Homo sapiens
  FLJ31818
  misc_feature [331]..[331]: Chromosome 7, SNP identification no. = rs6944843
  misc_feature [331]..[331]: allele = g, in linkage disequilibrium with rs10244551, respectively
  misc_feature [331]..[331]: n is a, t, c or g
aatgtagagataattctccccattctcctcctgattccctccacaggtctatttatgagtatgtgaaggcagcaacagcactggtggctgcgagtggaactaaaaagcagaaaaacattaggcttatgtcctgcaagagagttgcacctgtaatactcacagaacaggattcattcactatcaaagcacttgagaccagaagtgaattgaaaccacctaaagaggtcatccagctccaatacagctcaactcctgatggtatcaaagtgttcagtctttcattctagctgcctttcagagcaaaaaaagcatgtctctctggagaaaaagngtatttatgccaatctcttctaaacacaatgccagtataaaaacagaattatcacacataaagcaggaaaaaatgacccataaccaaaagaaaaaatagccaaaagaaacagacccacagataagacatgttagaataagcagacaaaaactttaaaataactattttaaatttatttttttaaaatagagaaaaagacaacccaaatggacaaaaacagagaacttcaacagaaaaattaaatctctaaaaagccaagtaactattatagaaaaactgggaaaaatggtatcttaaaaacatctttactggttaatgatagataaaaaa

SEQ ID NO: 3461 - DNA, 661 bp, Homo sapiens
  FLJ31818
  misc_feature [331]..[331]: Chromosome 7, SNP identification no. = rs1530756
  misc_feature [331]..[331]: allele = g, in linkage disequilibrium with rs10244551, respectively
  misc_feature [331]..[331]: n is a, t, c or g
gtgattatgatatgtaagggaattgaaaatataaggtatagttagaaagtggtaccatcagtggattgtggagtcaaagaataatggagttaaggaactaaagaaaggtgccaaaataataggagatgggatggttggggttaaatgtttttatttgcatttctagagagaagatggttataaatctgactgttttacagaatatacattttctccctcaagttaagaaacacaaaatgaggcatactactgaaccaaatagttcccctgtaacagaaagtcaggaaatcagtactattgctgtttaagaccatcattgttggattttagngtagtgcttttaaattactattacagtacagcaggcaggccctcaaactgtatctcttaaatgaactttgataggtagtattcttattggagcaattgctttcaccttctacttgaacaatgaatctgcctcaaacttcagtcttcttcctttttccttggatttttgttttatcaatcgttatattatcacatgaggtcattttttatgtaaactgatgaaaaatcattaggaatttaggtcatactgttaaaaaaagaacagtggcaagatatggttaaatttctttatttttttttttactatcagaagtaatactaagagaagtta

SEQ ID NO: 3462 - DNA, 661 bp, Homo sapiens
  FLJ31818
  misc_feature [331]..[331]: Chromosome 7, SNP identification no. = rs10249952
  misc_feature [331]..[331]: allele = a, in linkage disequilibrium with rs10244551, respectively
  misc_feature [331]..[331]: n is a, t, c or g
cggccactcaccccaactagcacgtaagctctatgagagcaaggattttgtgagttttattgtactcctagtgcctataatatgactggtacaaagtagacaatcactaaatattatttattaaataaaagaactaagttaaatacatatttttctctgaattatttgttgaatgaatgaaatatgcattattacagttttaaaatgagatgtaaaaatttttgaataaaaatggaaagaaaatgtaaaccagaagttatcataaacttactgtccatgagaaagacaatgctttatttttgggaattcatgtttatttatttagcctctngttttttttttttttttttggtccagggttacttttgcaggtttgttatataggtaaattgcacgtcacaggggtttggtatatagattatttcaccaccggggcaataagcatagtacccaatcgggagtttttcagggaattcatgtttaagtttagtcaatatacttatcctttcttataattttaccacattaagagaactagtataagcattatttcattttctgatatttttagcattagaatcaatatcatgagaaaataaacattatccaaagtcaatataaatgctggaataccctgaaccgtacatcaaaaattcaagat

SEQ ID NO: 3463 - DNA, 661 bp, Homo sapiens
  FLJ31818
  misc_feature [331]..[331]: Chromosome 7, SNP identification no. = rs17405723
  misc_feature [331]..[331]: allele = t, in linkage disequilibrium with rs10244551, respectively
  misc_feature [331]..[331]: n is a, t, c or g
ttccattaatcccagttactgggtattttagggtctacagtctaataagtactgagttgaaaaccaaactattagccctctaatttgatcaagaaagaagagtaaggatacaaacaaaccctctcacacattgttaagatgactatatatcagtctgagtcttggcctgaatactgattttaaacctgagagaattatttttgagggggctatgtactcatatacaaatatttccattaatcactaacatttgggtagtgactggcctctcaatttgttacatatcagactggcaataactattaacttaaaaaaagcagggaaaagtttnctagattctcaaataaaaattcctcagttttagaaatgttaaggtattcgagttcaatcatgttaaatcataataaattatgatttattttaatataatggccaatgttcttttttttttagcagtttgacttgaattcctattaatgtttttttccagcagtttcatttgaaaatgaccttctgtgataaaataactattcataaaacacaagtccaaggaaaaagaaaaaagggtgaagtttgaggcagattcaatgttcaagttgaaggtatacacaaatgctcctgtgagaataccacataccgaagttcatttaagacatacagt

SEQ ID NO: 3464 - DNA, 661 bp, Homo sapiens
  misc_feature [331]..[331]: Chromosome 7, SNP identification no. = rs17160078
  misc_feature [331]..[331]: allele = a, in linkage disequilibrium with rs10244551, respectively
  misc_feature [331]..[331]: n is a, t, c or g
aagtattaatattaaacttctgtttctaaaacataaaaatgttaaaacaacagtgtatgtcaattgtgcaaaaagacttgatcagctttattattgaagatacagctgtattccaagctggacaaatctttggttcatgactatttagaaatagaatctttaggaattcaattaaaatgaggactggaaaagtaaaatctatgtcattttgaaaatatttaccactgtttccaaaattcttacccatgaatataaaaatatccatgaagtttaaatgattttttgtattcagaattttaaaaagtagatgtatctttagttgagcacattntagagaaattgttaagccttttgtttttcatattttatttcaaatcatagaaactttctttggaaaattccgtatttaatgttttgatagagacaaacagtggagaactaacaagaaaaatatttttagtgatatatttctattcaatatggcagattacaacttaaaaatccttctattgattaaaaattaaaagggttattttctttaaaaatttatgtctttaactactatttcaatgacttccctgcaattcataatttaactgcgaacattaaaagtattcaaaataacacatagatttgttatctttcaaaagttaatagactg

SEQ ID NO: 3465 - DNA, 661 bp, Homo sapiens
  misc_feature [331]..[331]: Chromosome 7, SNP identification no. = rs1992988
  misc_feature [331]..[331]: allele = c, in linkage disequilibrium with rs10244551, respectively
  misc_feature [331]..[331]: n is a, t, c or g
gaccatatcattcaaatcactaccatttgaaagtgtgcaggggccttattaattattatgctaagacaacaggcatacattgggactttctcagacaaactgagatgtgtgatatgtggccacccttcttacacttcagtaatttctacaaaaacaggaggacagatcaacaacccggtagaaaaatggataaaggatatgaacaaatgatgatgatggcaataagagtaaccgcttacatggtgcttattatgttctaggcactgttcttgatatttctgcatacgaattattttatctttacaacaaccctatgaggaaactgaggtanaaatgaagaaactaaagtaagaacatttaagtagttcatacaaagaaatataaattgttcttaaatatatcaaaatatactcacctcattcatagtaaaagaaataaaaaactgtgctctgatgacatttttcatctatgagatttacaaagatctaaaaattgagaatatacattttctattgcctttggatggcaatttggcagtaactatcaaaagtataaatatctataccctttgaggtgtcaatctcattttaaagaatttattcttcagctatgtacatacatgtaggaaattatgattgtacaaggttatttattgtggaat

SEQ ID NO: 3466 - DNA, 661 bp, Homo sapiens
  misc_feature [331]..[331]: Chromosome 7, SNP identification no. = rs989996
  misc_feature [331]..[331]: allele = c, in linkage disequilibrium with rs10249457, respectively
  misc_feature [331]..[331]: n is a, t, c or g
gctctcttcctggtttttagatagatggctgacttcttgcttctcatatggtggggaacagagagagatgggaagcaagttttcttgtgtctgttcctataagtgcactaatcccatcacacaggctccaccctcatgacctaattatctcctaaaggcccctttccccaaataccatcacattggggattggagtttccatatatgaatttttagggggcataaacactcagcccatagcagcagaaattttaataacgtatacctttggtaacaggcagcctgcccctgtcttataataggagcctgggctagattcccaaagagcctntcagttcctttcctcacttgttggcgttcattgattcattcacctatttcctaaagaaggtcccatctcctacatccagtaaggtgaagaaaaggatcttgccccttctccgggattccacactcaactctcaaagaccaaaatacagaagccacagagagacacatatcagctatctataaacgactattcttccagagctccccaaatatcaaacaagcataattgaaggtaatgagttcccagtcacttaaggtattcaagcataggctaaatgacattttggaggggacatttaaagagagggatcaaatattagaccatggttag

SEQ ID NO: 3467 - DNA, 661 bp, Homo sapiens
  misc_feature [331]..[331]: Chromosome 7, SNP identification no. = rs13438629
  misc_feature [331]..[331]: allele = t, in linkage disequilibrium with rs10249457, respectively
  misc_feature [331]..[331]: n is a, t, c or g
catccatactgtcaatttggaagcctttttactagacaaaagtatgtgtgaagaaaatgaaataagtgaaaacagcactgatcagaaggaagatcagtgttttgtttaacactgtattagccagcacaggctgccataacaaaatactgtagactgggtgacttaaacaacagaaattttctcacagttccggaggctggaagtctgagatcagagtgccagcatggttgttttctggtgagggccctcattttggtttgcagacagctgctttcttgctgtgtgctcacatggctgggggagatctctttctctctctctttctcttccnataaggccaccaatcctataggtttagggccccacccttatgaccttttaactttaattacctcctaaagaccctatctccatatacaatcacattgggggttagggctccaacacatgaattttgcaggagaacacaattcagctcataggaaacacctgtgagcaatcttctacagttactcagcagatatatccccttagtgtaagaattctgcattgtgaatatatagtacttaagtattcttattggctttaaaactttcaacatatgctagataaataggaacttagtaaagggtaacttggacctgcattctggaagcaaaca

SEQ ID NO: 3468 - DNA, 661 bp, Homo sapiens
  misc_feature [331]..[331]: Chromosome 7, SNP identification no. = rs10249457
  misc_feature [331]..[331]: allele = a, c
  misc_feature [331]..[331]: n is a, t, c or g
tgcacatagagtgtagcactactttgggttgtcgtaccatcttcttgaggcctgtttagaacagcacccagagtgatgagtataaataccccatgtgtgagaccatctttggaaagcatgaagtctcaccaagagatgaagtgagaagctgatatgctggcagccagcataatggctgtttgaggccttgtgttgctgttcttttttaatgtgtataagttcacgtgaattttcattctagcataatatagcatattttattttaatataaaaatgtgttaaattacttagcctccttcccccacccattttgcaaccctcaagttcctcnagtaaaaagtatactctaggaaaaaaatgacaagctcttcctgggacttttcatactctctggcacagcggtgagtactcctattctgagctaggaggaaaaaagaaaaactgtaagaaaaagaagcagagtaacagaacatttcactcagtatgacaaaagtatgataagcctcaaatatccttggctaagctaattgacaaaactgtaaaattctattaaaattcatgggtcataattattttggcaaaaataattgagagaaagtttaaaaaggtgttgataaaagtaattttgaaaatgcaaagcattggtttaacaaatacattt

SEQ ID NO: 3469 - DNA, 661 bp, Homo sapiens
  misc_feature [331]..[331]: Chromosome 7, SNP identification no. = rs17569137
  misc_feature [331]..[331]: allele = g, in linkage disequilibrium with rs10249457, respectively
  misc_feature [331]..[331]: n is a, t, c or g
attttgtcatctgaaaaggtcactcccaattaaattgctggcagaattttctacaatttccgacttcacgggctattttggtcactagtaagctcagggtaactgaaaatatatacccatatacctcaccaccacatgttgttttagaatttcttctaaaatatttagaagacatttcctgtagagactggcaggcaattgtttgttttgcttttccatctggtattcaattaatatactaatagccactctaatttaccctgctataataccgatcttattttttcaagtggcatgtttattttcacttggggactgaaaaatactgcanattggaagcaacggttcatttgcagctgccacatctaaagcaactccagtgctgttaatgttctgtaatgggggcatctaagtttctccacttgcttggcattctcttggatgttaatgttcattaactttgtattattaatttaatgtttataaacattgttaataaatacaaaagacgttgcaaagcacaaatggaacactaaaagttagtgagataaattagacaacttttgtagacacatgtatgttgtggggtgtgtttttaccttttcccacttttcatcttcgctattaaccagctctgttggtagtgatgaaagtcactgaa

SEQ ID NO: 3470 - DNA, 661 bp, Homo sapiens
  misc_feature [331]..[331]: Chromosome 7, SNP identification no. = rs739619
  misc_feature [331]..[331]: allele = g, in linkage disequilibrium with rs10249457, respectively
  misc_feature [331]..[331]: n is a, t, c or g
gcgagtctccacacactgctgtatctgcctgcatgggagctgcaatctagtcctgcctcttgcctgccatgatcctgggggttttatcttaaaggcatttttctattcagataaaaagagagagagcaccaacaattatttagagattttgatggggtaatgagtggtaactacaagaaaggagcaatatctctgacctactctcagcagagcctactttctaggaaaacattcactagtgttgatgaacttcagagtctattgtgacaatggtgcagatctgggttgggctacccatgtgagaattttgggatatatgtcacagaccaanttaaaggaggaatgaacccacaaagctggcatcttgtgaaccatgaatcaagctaacatctgtcagtcttcaaagattgagcctactaattgcccagcactgaaaaaggctataggagatagaaaagtataacttatagtcatcactttcagccatatagcagtttctcacctttattatcttttctgttaggtagtctcgactaacaggctttctatctatgcaatgaggatatttccagctcactcacctgccattttaatgacttttctctgaatattctgatcctctcactcagttttccctaaatcccagcttcacacctacaaa

SEQ ID NO: 3471 - DNA, 661 bp, Homo sapiens
  misc_feature [331]..[331]: Chromosome 7, SNP identification no. = rs12706168
  misc_feature [331]..[331]: allele = g, in linkage disequilibrium with rs10249457, respectively
  misc_feature [331]..[331]: n is a, t, c or g
aaacctacaaaatactgctgaaagaaatcatagatgacacaaaaaatggaaacatatctcatgcaatattgtgaaaacgagcaaactgccaaaagcaatctacaaattcaatgcaattcccatgaaaataccaccatcgttcttcacagaactagaaaaaaaatcctaaaatttatatggacccaaaaagagagcctgcatagccatagcaagactaaacaaaatgaacaaatctggaggcatcacattatctgatttcaaactatactataaggccatagtcaccaaaacagcatggtactggtataaaaacaggcacataggaaaatgnaacagaatagagaacccagaaataaacccgaatacttaaagccaacggatctttgacaaggcaaacaaaaacaaaatgggggaaaagacgccatactcaacaaatggtgctgagacaattggcaaaccacatgtaggagaatgaaactggatcctcatctctcatcttatacaaaaatcaactcaagatagatgaaggacttaaatctaagacccaaaactataaaaattctagaagataacattggaaaaacctttctaaacattggcttaggcaaggatttcatgaacaagaacccaaaagcaaattcaataaaaacaaaggtaaata

SEQ ID NO: 3472 - DNA, 661 bp, Homo sapiens
  misc_feature [331]..[331]: Chromosome 7, SNP identification no. = rs10240110
  misc_feature [331]..[331]: allele = c, in linkage disequilibrium with rs10249457, respectively
  misc_feature [331]..[331]: n is a, t, c or g
ttaaatgcaagggtacatttgcttctcaagcacaataaaaagtcatttaaagacaaatctcataaataaaatggctgataagtctggaggatagtagtgtaagactataataaaatatggctatgaagcaatgaggtcactctcttactcacgaactaatctggaatgatgtaataataataggaactaacaatttgagcacttaatcagttcaagtgctttgtgtgcattatttcacttaatcttcataattcatacatcatttataccaaattatttatgtaacattcgtgtttccatttcacaaatgggaatagagatgctaagaggnccaagtgtcataaaggaaggacagggatttgaagccaggtatacctggcaccagaccggtgctcagtctaagccaccaacttgtcttccacaaaataagatccagagatgttttgagtaagtggaacataatctcaaggcattttgaagaataactcaagctcttcaaatctggatatactggctgtggtatcttgggtaaaacttagtctaaaaaatgtaatgaatcagtgcatacatggcagcaagaggtcaaggtgataatctgtaactataaatttggaatgtgcacttagtaaataagtgtggaagtcttaatgcatcgtcttag

SEQ ID NO: 3473 - DNA, 661 bp, Homo sapiens
  misc_feature [331]..[331]: Chromosome 7, SNP identification no. = rs10255829
  misc_feature [331]..[331]: allele = t, in linkage disequilibrium with rs10249457, respectively
  misc_feature [331]..[331]: n is a, t, c or g
agactataataaaatatggctatgaagcaatgaggtcactctcttactcacgaactaatctggaatgatgtaataataataggaactaacaatttgagcacttaatcagttcaagtgctttgtgtgcattatttcacttaatcttcataattcatacatcatttataccaaattatttatgtaacattcgtgtttccatttcacaaatgggaatagagatgctaagaggcccaagtgtcataaaggaaggacagggatttgaagccaggtatacctggcaccagaccggtgctcagtctaagccaccaacttgtcttccacaaaataaganccagagatgttttgagtaagtggaacataatctcaaggcattttgaagaataactcaagctcttcaaatctggatatactggctgtggtatcttgggtaaaacttagtctaaaaaatgtaatgaatcagtgcatacatggcagcaagaggtcaaggtgataatctgtaactataaatttggaatgtgcacttagtaaataagtgtggaagtcttaatgcatcgtcttagagacattgaggaaagcagctttactcattatattaaacaaacttacattaagaatacaataaagggtagagagaaaagaacagagctctgcaagtgaaata

SEQ ID NO: 3474 - DNA, 661 bp, Homo sapiens
  misc_feature [331]..[331]: Chromosome 7, SNP identification no. = rs8180706
  misc_feature [331]..[331]: allele = c, in linkage disequilibrium with rs10249457, respectively
  misc_feature [331]..[331]: n is a, t, c or g
cccctgttattgagattggccttgagtcaacacaggatggacaagcaagcatgtctggagaggtgtgaacatttgaaataagaatcacttcatgaggctaaaacaatatcttgtccgaagcacaatcaaaataaattatcaatgaaaaaataacatgatgtaaaaggaattaaatgagatacacctgaatattttctgaaaccattactatggcacagctgtacagcaatatctacatcctctcaacccacagaattcacctgaagtggaaagtaaaagggaaactcgttctaggatccattattatttatcatggcacaatgagtaaaangaacagatggccaattatttctgcaactgtaataaatgaagtgtttttatgggaaggggggagcctagatcaactaccttgcttatatactgatgggaaggccgaaggaaaactttgacatacagaggtcagaatcaaccaacatctgcaatctgttgctggttcacataaatattatcatttttcttttgcaataatttctgtttactgatttaccagtacatctgtgctttaagcaaaggtttaattctttcctgccaatcatttcttcctaattgagttttgtgagttaaatgagataatgcacgtgaaaaagagctttgcaaggtg

SEQ ID NO: 3475 - DNA, 661 bp, Homo sapiens
  misc_feature [331]..[331]: Chromosome 7, SNP identification no. = rs8180812
  misc_feature [331]..[331]: allele = t, in linkage disequilibrium with rs10249457, respectively
  misc_feature [331]..[331]: n is a, t, c or g
acatgatgtaaaaggaattaaatgagatacacctgaatattttctgaaaccattactatggcacagctgtacagcaatatctacatcctctcaacccacagaattcacctgaagtggaaagtaaaagggaaactcgttctaggatccattattatttatcatggcacaatgagtaaaacgaacagatggccaattatttctgcaactgtaataaatgaagtgtttttatgggaaggggggagcctagatcaactaccttgcttatatactgatgggaaggccgaaggaaaactttgacatacagaggtcagaatcaaccaacatctgcaanctgttgctggttcacataaatattatcatttttcttttgcaataatttctgtttactgatttaccagtacatctgtgctttaagcaaaggtttaattctttcctgccaatcatttcttcctaattgagttttgtgagttaaatgagataatgcacgtgaaaaagagctttgcaaggtgtaaacggatgcacctgctggctaatttagtttaagttgaattgtgcaaggatttaaacatgcttatctgttccattacagcaaaatgtgatatgtcaaacctggaattaaaacttgatgacaaaaatcaaggaaaatgagcagctggttggg

SEQ ID NO: 3476 - DNA, 661 bp, Homo sapiens
  misc_feature [331]..[331]: Chromosome 7, SNP identification no. = rs12537079
  misc_feature [331]..[331]: allele = t, in linkage disequilibrium with rs10249457, respectively
  misc_feature [331]..[331]: n is a, t, c or g
cctgagtgggagcagagggtgactttaagggtgactaacctccgaatgattgaataactactgaaggtagaactttaagagcctggtatctgttatcattcagaatgtttcagagtcccaaatgccacttaagaagcattgatacagaataagttccatgtatgggagatgggacagaattagcaaagtaccattaaccttttacagtagcaaaagaaaagtcataccatgatttatgtgaatttaaatgcaaaagtggctcagttcttgtgatgctatgattttctgtgatattcagatgctccttggaaactgtatgtccaagggaaancaagaaagagaaagaaagagacagagagagacagagcgagaaagggagaaagaaacgtaacaatgctgtcagtaaaatctgtaagacatgcaagacatgtattctcaacgggagtgaaaactggctctctagaggagatgaaaaatcttatcatttcaatgtagaaagtgcagatatacatacagtacataaatagatacacggcatatctgtggtattaaaatttcatagaaagtggcattaggaaaaaatgtttaaataaactcaggggaatgatatgaaaaagaagttgagaaacactgttgtaagacatgaaatatgagactagca

SEQ ID NO: 3477 - DNA, 661 bp, Homo sapiens
  misc_feature [331]..[331]: Chromosome 7, SNP identification no. = rs10487384
  misc_feature [331]..[331]: allele = c, in linkage disequilibrium with rs10249457, respectively
  misc_feature [331]..[331]: n is a, t, c or g
aaataaactcaggggaatgatatgaaaaagaagttgagaaacactgttgtaagacatgaaatatgagactagcacctcataaagaaggatgtggtgctggaagacatgggcaagagaagcaggacctataggcatccacatttgcatgttcaccaaatggtcctgtcttcctccccagcttcctttcactcagtcacctgcacagcaccttttgtgctagctgaaccacctgcatttccccaaggtggcattctgcttcttgctgccgagccttttcacatgctggtcctttgacctaggattatcttctctccctttctcacctgctaanccattcttaaagatgcaactcaagcatcatctcatgctggaaactttctagaggtgtgcaaaacaataataacaaaaaacaagcgaaaccaaaggaagaagcataggttgataacaggcatattgtgtcatttaaagctgctgactttgagcagagacttgaatgaagtgaggaagacagctatatgaatatttataggataaatgttccacattagaaaaaaatgccctgaaagcaaagcaagtttgtcaggctcatgaaggagctcagtgtagctgaagccagcaacagagaaggaaatttacaggaaattaggttggagaggtaagg

SEQ ID NO: 3478 - DNA, 661 bp, Homo sapiens
  misc_feature [331]..[331]: Chromosome 7, SNP identification no. = rs10258170
  misc_feature [331]..[331]: allele = c, in linkage disequilibrium with rs10249457, respectively
  misc_feature [331]..[331]: n is a, t, c or g
tccttggctttaaagacaatgctgtgtttgcagatcccagaggtagaaggtagctgagttactctgaaaacgaagaaaagcaccctcaccagggccaatgttccacagctttttataagcattgctttttgaaagtgggatcttgtgggatctcatatttgcatcttgtaactttttttttcctaacaatcaggctacttttggccagagagacataaaaacgaacagaataaaagaaagaacagagcctaagctggaaatgtacctactcacagcgggagccagcagagctggtcttgggcatgttgggacattggtgaaagcatagcantcagctccactggcttctctttttaaaaggtgccctccttcatcttcctcactccagggataactccttcccattccctaggatttcttgtgtccctaacaaaacctctttacagagtcaatagaaagtgtgatgatgtggtatattggaaacagtactcaatgtacaaacaactaattcctggcctcaatttcatcatttattagcaatttgacttagggcaagtggttcaactctgactcttcttagtttcctcatctataaaatgggatccaaactcagttcacttcacaaacttatttttaggatccagtaagaaaacatacaggt

SEQ ID NO: 3479 - DNA, 661 bp, Homo sapiens
  misc_feature [331]..[331]: Chromosome 7, SNP identification no. = rs10487490
  misc_feature [331]..[331]: allele = t, in linkage disequilibrium with rs11761076, respectively
  misc_feature [331]..[331]: n is a, t, c or g
ctttaccccatcctccacgaagtgttctcctctctgtgatcttacactcctttttttcctctgcctactaactctggggatgctgaaaaaccccctgtccagcccttcagaggttcccttccaacacttagtatctagaagactgcgtctaagcatatggtttaattcgcaatataatctgaatgcacaaatcaatacctgcagtcctgaccttcccttctctctcctagtcaatatctcctgatgattcaatggcttagaataggaggattgccttcacagtcccttctttgatgcgataattttataccctatcaatatctattgcttnaacggctaaaaattaagaattgtctccctactgaatcatcgcccctttccaactcccctatttcatcaaatgcagcataaccttcccagccttgtcatggatactgaggctggctcctctcttcccctgtaccccttcctacagtaagagttctaatctcaaatcccactgcttttcacctagacagaaataatggagtgcttatcttctttcaagaaaccaatcacgatgtactgatgactcccaaatccccatctccaccccagacctctcacctaaccgtcagacctacataatccaaacagttattggtcatcctctcttggataa

SEQ ID NO: 3480 - DNA, 661 bp, Homo sapiens
  misc_feature [331]..[331]: Chromosome 7, SNP identification no. = rs10273635
  misc_feature [331]..[331]: allele = g, in linkage disequilibrium with rs11761076, respectively
  misc_feature [331]..[331]: n is a, t, c or g
gctctcaagtaaatttgttaaagctttcaggcatgcctcaccctgtttttgaaaaattatttttcatttatgtgctgtacattattactttgtgtgcaggcattatctatattgtactgcacaaaaataattgattactcatgagtgacagaataattggcactaccctggttattcagctatttttatgcattataattatcagcttcactacactagacagaatttaatgttcttgaaaattaatattgtctaaggacttgatacaaaagaatgtaatgttcttaaattaaaaacttgtcacacactgatagagtctcagattgttggntatttatcaacattttgttttaatcatttcaaaccctttatcaaatcgcagagcttgtagtccaaaccaattcagtacaactgaattctagtaagtttacaatctgaattagtgtttgcaatggtaatattacatgtttacagctgtacatgtattgaagacctagaatcttttgcctactgacctgcattatgactgtgagtttcttgaaaccaaaaaaaaaaaaatggatgggggggggttatttatataagagcctaagtgcctcatgtgctaaggctgcatgaaatatattaaataagcagaataatgtacaactataatgcctaa

SEQ ID NO: 3481 - DNA, 661 bp, Homo sapiens
  misc_feature [331]..[331]: Chromosome 7, SNP identification no. = rs4141409
  misc_feature [331]..[331]: allele = g, in linkage disequilibrium with rs11761076, respectively
  misc_feature [331]..[331]: n is a, t, c or g
atatttaagtcatatatattacaaaaatagtaatcaacgtagaataatagcttatgatgacataatgcagaacttaataaggaaatgtggaagaagtcttctgatcattttgcacaaacacttccattacgacagtgtgtactcggtacttttttccatcttttgccagttgccagatttctcagatgagaaagaatgcctaataagatttgaggtgtagttcagttgtccctgaatacacaaacattttctttctataatgcagctaaattctggccacgactctcttattgctcctgtgggtcacaaaattggtggatgtgcacatgtnagtctgtggcaagtcacagcaacagacactgttgtctctgccctttatgttccgagtcagacagaagactctttgatgatggcctagcaggtttttttccagctaattttgatgcctgtgtgcttgagatgctatttcttacatcatcaagcaaacattactggcataatttgaaaaattacaaaattacagggatgtctctatttactgttttgacagactgacttctcgttctcaaggtgtctccccttttcttcaagtggtaatttaccaaaaagttagttaccgatcattagttcccacatggacctagcccagtagtctaaatta

SEQ ID NO: 3482 - DNA, 661 bp, Homo sapiens
  misc_feature [331]..[331]: Chromosome 7, SNP identification no. = rs11984364
  misc_feature [331]..[331]: allele = t, in linkage disequilibrium with rs11761076, respectively
  misc_feature [331]..[331]: n is a, t, c or g
ggaaaaaaaactatgctaaaatttatacagaaccaaaagagcccagatagccaaagcaatttcaagcaaaaagaacaaagccagaggcatcacattacctaccttcaaactatactataaggctacagtaaacaaaacagcatggtactggtacaaaaacagacacatagaccagtggaacagaagagagaatcaaaaagtaaagccatacacctatagccatctgatctttgacaaagttgacaaaaataagcaatgaggaaaagactgcctattgaataaatgatactgggataactggttagccatatgcagaagaatgaaactggantttcacctccatcatataaaaaattaactcaaaatgaattaaagatttaaatgtaagacctcaaactataagactcctagaagaaaacctaggaaacaccattctggacattgacttcgggaaagaatttatgactaagtcctcaaaagcaatcacaaaaaaattatgacaagtgggacctaattaaactaaagagcttctgcagagcaaaaaaaactattaacagaataaaaagacaacctacagaataggagaaaatatttgcaaactatgcatctaacaaagggctactatccagaatccataaggaatttaattcaacaaggaaaa

SEQ ID NO: 3483 - DNA, 661 bp, Homo sapiens
  misc_feature [331]..[331]: Chromosome 7, SNP identification no. = rs17658206
  misc_feature [331]..[331]: allele = t, in linkage disequilibrium with rs11761076, respectively
  misc_feature [331]..[331]: n is a, t, c or g
cccctggtggcatcagcctcaccagggagctggctagaaatgcagattgtcaggccccattccagaccaactgaattagaatctattttaataagaaccccagtcatccacatgctcactaaaatttgggaagcacccatccaaaccaaatgactgagaagtgatcatgggagagaatcaggtagctgtcctggaagagcaatgaccccgcatccctcgccccaaccaagcctgtgaaggaaagagaccctcaatgaggtcggggaaagagaaaggggtggagccatacacagaggtcaaatcacagcattattggccttcacaaaatccngtgaggcatcttaggacttgaatccttaacctttcaagtctaagccttgagcttggaagattcatgagcaagcaaatggatgcagcagagaagaagaacctgcagatgccgtgtcatgtgtttttaatttcctgaaggatttgggtgatgacagggctaagtatcatcctgagatggactggagaatgtggcagtgtctctgaattacccggcagcagaggcaagctccctggagttgctgtgggaggcagggtgggtgggcctccttgctccctcccccacgtggccagagttttgtaattcccacatgacgtccactgtgctgggcag

SEQ ID NO: 3484 - DNA, 661 bp, Homo sapiens
  misc_feature [331]..[331]: Chromosome 7, SNP identification no. = rs4731367
  misc_feature [331]..[331]: allele = t, in linkage disequilibrium with rs11761076, respectively
  misc_feature [331]..[331]: n is a, t, c or g
gttttttgagagctgtataaactttctgaaattctgcaaacctaaacctgtcaaggaaaggtagaaaggcaaccacatgtgttgattccttaggagacaaactatgtcactgtgagaaaatacactccaaggaatttatttctagtgagtttcaatagagtgttaactggtaggaatgagaatgtttgctgtgactttttaagtctcactggagccctagatgaaaatacaatgacttccttttgatgataaatatttgtttgatgatgagtcaagaatattctaagcaaaatgagaaaggaagatcagcgccttcctcattaccaccaangcaggcttcagagaccaaggtgattccaccagcactcagaagaacattgtttaagacaaatctaagcgggtttttttttccccccatgggaatgcgagaataagagaaaggatgccatggtatattgtaaaagtcttcttaggagctctgaattctagtcctggctctgcctctaagtaacagaatgaccttgaactagtcactttatctctctagtccttactttcctcatctataaaatgagaaagctaaactagatgatttccaagggcagccccaaacataacgtcaaagaatgatgagggcattcctctggagagtgcatataat

SEQ ID NO: 3485 - DNA, 661 bp, Homo sapiens
  misc_feature [331]..[331]: Chromosome 7, SNP identification no. = rs6962882
  misc_feature [331]..[331]: allele = t, in linkage disequilibrium with rs11761076, respectively
  misc_feature [331]..[331]: n is a, t, c or g
agactgagcacgtgaccttggggcaccaaatgactatgcaactgaaattgcccatcaagccagatatgagcagactcacagaatcatgagttcaggcaagcacagcagcaattcactgtacgatgaaaatggtatattcaggattggacctgagcaagtccagaagtaatgaataaatcacatgaataggtaacccagattcccattcacctaactccattgcactaacacctcttcctcaactcactctcacagccttgtaaaggatttcttaataccaattaacagaggaaggaaagagccatgattcatataatagatgggtcaatanaatacattggtggtaaaataaaataaactatgctgcagccgcattatccaggagcaggcctaaaggacagtgacaaggaaaattctacctgtaggcatagctgtaagcagtatacttgatgattcactctatatggaatggtctgaagtaaagatatatattgattcctaggaagtggcaaaaaaaaaaatggtttaattatttggtcagggtcctgaaaaaaacaagattagaaagttggaaataaggaggtctggggaagaggcatgtggctggacatatggatataggtactaagtgcctagatctttgtgtcccaccagagagcat

SEQ ID NO: 3486 - DNA, 661 bp, Homo sapiens
  misc_feature [331]..[331]: Chromosome 7, SNP identification no. = rs2896394
  misc_feature [331]..[331]: allele = a, in linkage disequilibrium with rs11761076, respectively
  misc_feature [331]..[331]: n is a, t, c or g
gtgggggggttgaagaagccagatgtcttgtgactcttcttataagggcactactcccattcatgaaggctccaccctcatgacctaattacctcctaaaggctctacctcctcataccatcatattgagtgttaggatttcaacgtatgaatttaaggtggggaaacacaaacattcagtccataacagttcctataagtcaaagcaaaagatataaccatgcctaacttcaggcaggtgaccaagtgcccaaggagaactggaaacattgatgactagtagcccaggctcattgaggccagaaacaatgtcttattaacttggtatctntcatctatcccacatcctcacagatctgagggttccagtaaatgttgaattgtttgctcaatggaagtttaaaaatcccctcaaattatcttatcaaatcaatcatctttctaggaccaccctccaaccccaccaaaattagcttatgcaacatttatttctagaattcatccaggcagtgaaaaaattaaaacttgctgaaaattagattctgcccaactccatcacctgctaccatccgggggaaggactttccaaaacagaccaagcaccagccctctagtggaagaaacacttattttggcttttgtgctgcagtccaatttgatg

SEQ ID NO: 3487 - DNA, 661 bp, Homo sapiens
  misc_feature [331]..[331]: Chromosome 7, SNP identification no. = rs11761076
  misc_feature [331]..[331]: allele = a, g
  misc_feature [331]..[331]: n is a, t, c or g
aagaggggagtctataattccagccaagggaagagtaaaattggtaaatggcttggaacacactgagtctgaagtgcctggcactcctagatggagacattgcattgactccatgaaaatgaagcttaaaagatctgaactggagcagagatttgggagtcatgtggtggatggcaattaaagcaaggacaatggacgcttacccaagagagctgtcaaaagaagaccaaagacagaactcaggcaaacacacgtttcttagcaaggtcgaggaagaagaggcaattaagtcatacacataagaggagaagttacaggagaaagaagaaanaggtattgctgcctataagaaaagtttccagaaggacttgttaatagtgtcagaggccatggggatccaatgggtcaagaatctgaaggagaggtgcttctgtgtggaggtgcaggagaggtaactctagagaagaaaaagtggacacaaaccatggaaccatgaggcagtctttgctggaggaatctataccttttagttccttcagataacagcacaagggtttcacaaagaaattccccttgggagagccttcactgtaggaagtggaaggaaggaaggagtaacctattttattacctatactaattactcattgatttttggacc

SEQ ID NO: 3488 - DNA, 661 bp, Homo sapiens
  misc_feature [331]..[331]: Chromosome 7, SNP identification no. = rs1419429
  misc_feature [331]..[331]: allele = c, in linkage disequilibrium with rs11761076, respectively
  misc_feature [331]..[331]: n is a, t, c or g
ggtacaccttcagttcctaacatttggctgtgtgttctggatgcaaaacttacctcgactttctgagatgatgtcttcatggatcaatcattccctaacagctatgtggacgtgggccaggttgactgcaggctcactcattgccattcagtgtccttaagggcttcactcactctagaaccagaatgtgcacttctgctccatcacttccatctttctagccacccacccaggactttaaaactctattctttctggacagataaatataatctctccagaaagcactgacgatacaagtgatgtctgattatcacccgtcaagaaagtnatattgaatgacactcatcttttaaacagtccagccagggcagagatgaatgctacgatatgggtgaggacattctttttgttgaggacaagggagttaatgaagttcttattttatattttagaataattttagatttacaggaaaaactcaaagacaatgcacacagtgcccatatacccaagcccagctttcctcatgatgaacgtcttacaatagtatagcacattgtcacaactaatgttgataacattattattaattgaagtccatactttactcatataaatatccagccctgaaatatcattagtttttacccaatgtcct

SEQ ID NO: 3489 - DNA, 661 bp, Homo sapiens
  misc_feature [331]..[331]: Chromosome 7, SNP identification no. = rs10265603
  misc_feature [331]..[331]: allele = g, in linkage disequilibrium with rs11761076, respectively
  misc_feature [331]..[331]: n is a, t, c or g
tgttcccaatgagactgaacgaggtgacattttgcctttttatttccattctcactctataaacaagtgtcctttccaaggtccatttagtgccacatttttttgtatccttatgcttttatttggtgatttcactgtttataatggcccccaacttagtgctgaagcactgtctagtgttcctaagcatgagaaaactgtgatgtgccctgtggagcaaaacaggtgtttgcataagcttcattcaggtgtgactcatagtgctgttggctatgggttcaatgttaatgaatcgacaacatattaaaaaagaaatacacacagaacaagnttatgcctttaaacagaaacacacatagaacagattatgctttaatcagttgatgacaatgcgttgaccagaagcttacaggaacctaactctatattacctctaggaaccatggctcagtattcgctaatgcagtgctcatggcaactttctagaatgtaactactgtggataatgagaatcaactatacttaggaggtcacttcctccagactcaagggtcaggagggttctaagagacctgaggtaggagtgagccagaagtgacagatgggggaaagagtgtcccaggtagaagatacagcaagagcaaagccctggaggtctcag

SEQ ID NO: 3490 - DNA, 661 bp, Homo sapiens
  misc_feature [331]..[331]: Chromosome 7, SNP identification no. = rs6976685
  misc_feature [331]..[331]: allele = c, in linkage disequilibrium with rs11761076, respectively
  misc_feature [331]..[331]: n is a, t, c or g
acaagattatgcctttaaacagaaacacacatagaacagattatgctttaatcagttgatgacaatgcgttgaccagaagcttacaggaacctaactctatattacctctaggaaccatggctcagtattcgctaatgcagtgctcatggcaactttctagaatgtaactactgtggataatgagaatcaactatacttaggaggtcacttcctccagactcaagggtcaggagggttctaagagacctgaggtaggagtgagccagaagtgacagatgggggaaagagtgtcccaggtagaagatacagcaagagcaaagccctggaggnctcagccagagcagagactttgaggggctgagcagcagtgtgattggcagggagttggaggaggagaggccggaggactaaactaagggccaaccacacaagaacccataaatcctattgaaggtgtgggattcacaaatttaagcagctgagctccacaaagtctataccgttcacattaaagttcactggtggccaaatctgatggtgggttctctgtttccacaacccctgacccctcggcaggtagcttttcacacggcaacccctgcttcttgatgtgctttcttgtttgggctttggtgactccatgctcacctggtttaatcc

SEQ ID NO: 3491 - DNA, 661 bp, Homo sapiens
  misc_feature [331]..[331]: Chromosome 7, SNP identification no. = rs10280804
  misc_feature [331]..[331]: allele = a, in linkage disequilibrium with rs11761076, respectively
  misc_feature [331]..[331]: n is a, t, c or g
agagggctagaggaataaatagcccgacctcactctccttgctcccttcccccagatcttcttccagggctctttattggccaaacacaatgggaagccacaggacaagataggctgttgagtcaatacaggtcagattattagagttcagtgcagggtaaaaaaagagtggagagtggttctgaagggcaaattgaagacacacagcacaactcccaaatctgtctctggtcttgacctgtcccctgaggtcaaactcctacaaccaacctttaacccaactccccaacttggcctatctaagaacatctcgaacttaacttctgacaantcaaaactcttggtttgctgccccctacattcacctccatcctcaaacctactttttttccttggttttctccatctctgtaaatagtaccaccatcacctacttactcaggccaaaaccttgggagtcattattgttttctctctctctccctcacagttgacatccaaacattcagtcaatcatacaggctccctccaaaatacatcccaagtctcatgacttccattgctaaaaccccatttcaaaccatcatcaactcctcccatgactgctacaatagtgtcttgattggccacccttcttccactgttggactccttccactta

SEQ ID NO: 3492 - DNA, 661 bp, Homo sapiens
  misc_feature [331]..[331]: Chromosome 7, SNP identification no. = rs10281056
  misc_feature [331]..[331]: allele = t, in linkage disequilibrium with rs11761076, respectively
  misc_feature [331]..[331]: n is a, t, c or g
gcacaactcccaaatctgtctctggtcttgacctgtcccctgaggtcaaactcctacaaccaacctttaacccaactccccaacttggcctatctaagaacatctcgaacttaacttctgacaactcaaaactcttggtttgctgccccctacattcacctccatcctcaaacctactttttttccttggttttctccatctctgtaaatagtaccaccatcacctacttactcaggccaaaaccttgggagtcattattgttttctctctctctccctcacagttgacatccaaacattcagtcaatcatacaggctccctccaaaatanatcccaagtctcatgacttccattgctaaaaccccatttcaaaccatcatcaactcctcccatgactgctacaatagtgtcttgattggccacccttcttccactgttggactccttccacttaatcctccaaatagtagccagagagtacttctcaaaggataaaccagaatacagcctcctctgttttaaatggcttcatacagtaatttgaataaaatccaaactccttaccatgaccccaaggcctccatgatctgacacagtctacttgtatgactcatctcttattcccttcctcctctttccttccactatggccagtctggt

SEQ ID NO: 3493 - DNA, 661 bp, Homo sapiens
  misc_feature [331]..[331]: Chromosome 7, SNP identification no. = rs10276671
  misc_feature [331]..[331]: allele = g, in linkage disequilibrium with rs11761076, respectively
  misc_feature [331]..[331]: n is a, t, c or g
atagtagattagatcatatgaataagagaggataccacccctcatattgtcttatgcccaatttctgcctccaaagaaataagtaaaaactaaaaggcagaaatggaatccacaggcagatagcccagcaccgtgtcctgggcctggtagttaaaaaatcaacccctgacctaacttcttgtgttatctatagatttcagacattgtatggaaaagcatcgtgaaaatccctgtcctgttctggtctgttctgattaccggtgcatgcagcccccagtcacgtaccccctgcttgctcaatccatcacagccctttacgcagaccccctcntaagcccttaaaagggacaggaattgctcactcggggagctcagtttttggagacgtgagtctgccgatgctcccagctgaataaagccctttccttctacaacttggtgtctgaggggttcttgtcagcggctcgtcctgctacaataccattgtaaatattaaatttactgcagttgataactacactgtggttatgtaagagaatatccttgttctcaggaaatactcactgaagatttaaagggcagagagccatgacatatataatttactatcaaatggttcagaaaaatatacacatgtgcacagagggagcaaatgataaag

SEQ ID NO: 3494 - DNA, 661 bp, Homo sapiens
  misc_feature [331]..[331]: Chromosome 7, SNP identification no. = rs11766383
  misc_feature [331]..[331]: allele = t, in linkage disequilibrium with rs11761076, respectively
  misc_feature [331]..[331]: n is a, t, c or g
ctgccgatgctcccagctgaataaagccctttccttctacaacttggtgtctgaggggttcttgtcagcggctcgtcctgctacaataccattgtaaatattaaatttactgcagttgataactacactgtggttatgtaagagaatatccttgttctcaggaaatactcactgaagatttaaagggcagagagccatgacatatataatttactatcaaatggttcagaaaaatatacacatgtgcacagagggagcaaatgataaagcaaatggaacaaaattttaacaatagatgaatctgagtaaagaatatgtgagtgttctttgnagtattttgaaactttgcagtcaatgtgaaattacttccaaaaagtttttctcgaagggggcaggtgccactcttggccctcttgtctccagatgctacacattcctcaagtaatctcacccacattaatgcctacatcacacactacgacaatctttatctctactccaacctgtgctcttgaattcccaaactctattttcaactcacttctagacatctccacccaaatgtgccctgggtgaaacatacccacatcctaaaggcatcttctttcttctatgaaatgggcaccattctcctcccagctgcttgggttcctcaaagaga

SEQ ID NO: 3495 - DNA, 661 bp, Homo sapiens
  misc_feature [331]..[331]: Chromosome 7, SNP identification no. = rs10954161
  misc_feature [331]..[331]: allele = a, in linkage disequilibrium with rs11761076, respectively
  misc_feature [331]..[331]: n is a, t, c or g
tcagcggctcgtcctgctacaataccattgtaaatattaaatttactgcagttgataactacactgtggttatgtaagagaatatccttgttctcaggaaatactcactgaagatttaaagggcagagagccatgacatatataatttactatcaaatggttcagaaaaatatacacatgtgcacagagggagcaaatgataaagcaaatggaacaaaattttaacaatagatgaatctgagtaaagaatatgtgagtgttctttgcagtattttgaaactttgcagtcaatgtgaaattacttccaaaaagtttttctcgaagggggcangtgccactcttggccctcttgtctccagatgctacacattcctcaagtaatctcacccacattaatgcctacatcacacactacgacaatctttatctctactccaacctgtgctcttgaattcccaaactctattttcaactcacttctagacatctccacccaaatgtgccctgggtgaaacatacccacatcctaaaggcatcttctttcttctatgaaatgggcaccattctcctcccagctgcttgggttcctcaaagagagctgcactccctttgccacaatctggggaacaggaagacactggagccacaccagaaaaatgga

SEQ ID NO: 3496 - DNA, 661 bp, Homo sapiens
  UNQ2754
  misc_feature [331]..[331]: Chromosome 8, SNP identification no. = rs2741083
  misc_feature [331]..[331]: allele = c, t
  misc_feature [331]..[331]: n is a, t, c or g
tattcatgtatgtgtgcagtgtgtatctgtagtgtgtgcagtgtgagtgtgtgtgtgtgcacgcatgtagtgtgggtgtatgaacaggggataggaacatcaggaggaaacagagctaatagaatacttccagcagtaattggtgaagggagtcctaggaatggaaagtagggagcaggtgcaggaaatagtggagttggagatcaggatttgatgactgaacaggggagatgagggaagttgcagtggctttgaggtttcaggcctaaatgacttggaaatggtggtgctaccgacggaaataagccaggtgaggagtgctggattggcnacgatatgaatttcttcagcagtgaggaatgtgaggatgggtggagcccccataaggagagatctggatgaccagttgtggttgagggactggaagtggccagaagagactgtgtgaagacagcatagaccaaggacagcaccctggggactgttcccactaaggggcctggatacgaaagggacaccagcaagggtgggtggaagccgagaaccaggcagcggagagagctgctgatctctgcactgtggattacaggatggggtggcccagggccacggggacacatctgctcacccagcctgggtggtcctccgaggctctcggaaa

SEQ ID NO: 3497 - DNA, 661 bp, Homo sapiens
  PSD3
  misc_feature [331]..[331]: Chromosome 8, SNP identification no. = rs12549858
  misc_feature [331]..[331]: allele = a, in linkage disequilibrium with rs10503636, respectively
  misc_feature [331]..[331]: n is a, t, c or g
gcagccaaaacaagttaatctcccaagaggggagtcagacctcctcataggggagtcacccctcccctactgaaagcatatgaggacaagctggtcttggcacttcttagaaagatcatgctgcagtattgctattatgacacaacggtaaggaaaaaaagaataatggttgattagtgtattccccatgaagattattctggcatcggatcaagtaatgggtggtcatattctaggtagtatagcattaaggagaaggtgaaaaggagcagaacagtagaaataattcattttatctcctgcatgattcgatttcataggggccatgctnacaagtcaaacagacactaaaacaacaacaaaaaaatcaggcaatcatgatgcaagagaagctacatccagaattatggattaaaaacttaccacctagaagaataatttatttttaaaatgaatccagaggagaaagatagaagaaacatatttacatggttagttcttatgatagctactatatattcaacagacttgtaacagcatgcattatggaaaactaatacataaaacctaaatagacaatcccaagtatatcgcacacatttttaaaacagagaactacttatcaccaaacacatgatcctgaatatgacagagattcact

SEQ ID NO: 3498 - DNA, 661 bp, Homo sapiens
  PSD3
  misc_feature [331]..[331]: Chromosome 8, SNP identification no. = rs10503636
  misc_feature [331]..[331]: allele = c, t
  misc_feature [331]..[331]: n is a, t, c or g
ataggggccatgctgacaagtcaaacagacactaaaacaacaacaaaaaaatcaggcaatcatgatgcaagagaagctacatccagaattatggattaaaaacttaccacctagaagaataatttatttttaaaatgaatccagaggagaaagatagaagaaacatatttacatggttagttcttatgatagctactatatattcaacagacttgtaacagcatgcattatggaaaactaatacataaaacctaaatagacaatcccaagtatatcgcacacatttttaaaacagagaactacttatcaccaaacacatgatcctgaatangacagagattcactgttattgataattttctccctcttctatcagtaattttgccacgactgccaattattaattatccatgattggcctaactcaaggtaatattaaaatgttaatttatgtaaactcttttccatcccagttgccaagaagaagcaggatgcttcatctaatctccttacaattccttgtaagtctaaagaagagcaaatgtcctagatttgcagctctaaacctgtagctactgaaacctgggtgtccacagctcatctagacatcaagcatgctgagatatctaataaaaaataacatctttattggttgctacat

SEQ ID NO: 3499 - DNA, 661 bp, Homo sapiens
  PSD3
  misc_feature [331]..[331]: Chromosome 8, SNP identification no. = rs2069245
  misc_feature [331]..[331]: allele = g, in linkage disequilibrium with rs10503636, respectively
  misc_feature [331]..[331]: n is a, t, c or g
cccgacatgttttggatctaagtttcacaaatccacacttacgtggccatgtagatcggtattaagaagcattattgcacaggtaaggcaatggactccatctaaagaaagatacaagaaaaaaaagcatgaattcgcttttcactgttggactccaccttattatcactaataggatacactcagaacctatgaaaacagtactgtgctaggtacaattagtcctgttttaagaaacaaaaaatggataagaataatttatagaaagaacctcaatgcacagaactggactccactgttgataagttgttcttacctctctggaggacantttggtagtagatatgtaaagccttcaaacaatgtcttttgatacaacaaatcggcttctagggctttgcactacagcaataattagtgatctatacatagtacaaggatatccagacaagcattgcttacaatgggagacaagtaaatatgagcctccaaagacacattactgttaggttaaagtcatataaaaatgttctccaagtagagttaagattctcctttccaaacactacaattagttgttctcgttactctcactctgctaattctctacacaagtacagtagacaatagcagtttcagatgcagtaaaaatcttttcaat

SEQ ID NO: 3500 - DNA, 661 bp, Homo sapiens
  PSD3
  misc_feature [331]..[331]: Chromosome 8, SNP identification no. = rs11997879
  misc_feature [331]..[331]: allele = t, in linkage disequilibrium with rs10503636, respectively
  misc_feature [331]..[331]: n is a, t, c or g
aaacaatgtcttttgatacaacaaatcggcttctagggctttgcactacagcaataattagtgatctatacatagtacaaggatatccagacaagcattgcttacaatgggagacaagtaaatatgagcctccaaagacacattactgttaggttaaagtcatataaaaatgttctccaagtagagttaagattctcctttccaaacactacaattagttgttctcgttactctcactctgctaattctctacacaagtacagtagacaatagcagtttcagatgcagtaaaaatcttttcaatttacgctaaattagaaggtctaattantgcactcataaattaaagccagggtattttcaaaagtaagttctttagtatagtaggtgatttctgttatcagtgtctctaaatagacactaccaaatggctaaaagtatatttattctagtaccactttattatcacaagttctacatatatttaaaacaaattctcgaaagtattttaagaactcagcagccaactctcaaatatcctcatcaacagccaattaagtcacgaatccatatttcttattttatccaagaatgtaaacatattcttagatttgaagaaggttctaataaaaatggcccacttttatctccttcattctct

SEQ ID NO: 3501 - DNA, 661 bp, Homo sapiens
  PSD3
  misc_feature [331]..[331]: Chromosome 8, SNP identification no. = rs11986109
  misc_feature [331]..[331]: allele = g, in linkage disequilibrium with rs10503636, respectively
  misc_feature [331]..[331]: n is a, t, c or g
agagttaagattctcctttccaaacactacaattagttgttctcgttactctcactctgctaattctctacacaagtacagtagacaatagcagtttcagatgcagtaaaaatcttttcaatttacgctaaattagaaggtctaattattgcactcataaattaaagccagggtattttcaaaagtaagttctttagtatagtaggtgatttctgttatcagtgtctctaaatagacactaccaaatggctaaaagtatatttattctagtaccactttattatcacaagttctacatatatttaaaacaaattctcgaaagtattttaanaactcagcagccaactctcaaatatcctcatcaacagccaattaagtcacgaatccatatttcttattttatccaagaatgtaaacatattcttagatttgaagaaggttctaataaaaatggcccacttttatctccttcattctcttgtcagggctaatggtgacagagatagtgaataactggtctgaatagcatcagtttaccgataggaatgtgaccttaatcaggtgataaactaactgtgactgcagccttggacatggaggggaggttgaggcaagcaccttggccaataccaagtaaactatccaggttaactggcaatac

SEQ ID NO: 3502 - DNA, 661 bp, Homo sapiens
  PSD3
  misc_feature [331]..[331]: Chromosome 8, SNP identification no. = rs11993467
  misc_feature [331]..[331]: allele = c, in linkage disequilibrium with rs10503636, respectively
  misc_feature [331]..[331]: n is a, t, c or g
caattagttgttctcgttactctcactctgctaattctctacacaagtacagtagacaatagcagtttcagatgcagtaaaaatcttttcaatttacgctaaattagaaggtctaattattgcactcataaattaaagccagggtattttcaaaagtaagttctttagtatagtaggtgatttctgttatcagtgtctctaaatagacactaccaaatggctaaaagtatatttattctagtaccactttattatcacaagttctacatatatttaaaacaaattctcgaaagtattttaagaactcagcagccaactctcaaatatcctnatcaacagccaattaagtcacgaatccatatttcttattttatccaagaatgtaaacatattcttagatttgaagaaggttctaataaaaatggcccacttttatctccttcattctcttgtcagggctaatggtgacagagatagtgaataactggtctgaatagcatcagtttaccgataggaatgtgaccttaatcaggtgataaactaactgtgactgcagccttggacatggaggggaggttgaggcaagcaccttggccaataccaagtaaactatccaggttaactggcaatactgaagctaagaggtaattactatttcttg

SEQ ID NO: 3503 - DNA, 661 bp, Homo sapiens
  PSD3
  misc_feature [331]..[331]: Chromosome 8, SNP identification no. = rs11786921
  misc_feature [331]..[331]: allele = t, in linkage disequilibrium with rs10503636, respectively
  misc_feature [331]..[331]: n is a, t, c or g
tatcctcatcaacagccaattaagtcacgaatccatatttcttattttatccaagaatgtaaacatattcttagatttgaagaaggttctaataaaaatggcccacttttatctccttcattctcttgtcagggctaatggtgacagagatagtgaataactggtctgaatagcatcagtttaccgataggaatgtgaccttaatcaggtgataaactaactgtgactgcagccttggacatggaggggaggttgaggcaagcaccttggccaataccaagtaaactatccaggttaactggcaatactgaagctaagaggtaattactanttcttgggaatctagtctcagtgatttactccatcatctgtaagtttatgaaacattttccagtcacaagtcaaagtgcttcacttcaaacactgaaaagtgtactttattgcaggaactgaaatggaggaaagatctctcttcacaaggtaggtccacaaacaaacagtttaccattaagtcacttactttgtaaaaatagtgtaatatgcataacctcatagtttattaaaatcatcaacaaaagtttgtggtcagtatagtacaattaatatcaaacgaaagcaccagagacacagcgcaaccaccagtgagatttgttaatttttc

SEQ ID NO: 3504 - DNA, 661 bp, Homo sapiens
  PSD3
  misc_feature [331]..[331]: Chromosome 8, SNP identification no. = rs11786923
  misc_feature [331]..[331]: allele = t, in linkage disequilibrium with rs10503636, respectively
  misc_feature [331]..[331]: n is a, t, c or g
agtcacgaatccatatttcttattttatccaagaatgtaaacatattcttagatttgaagaaggttctaataaaaatggcccacttttatctccttcattctcttgtcagggctaatggtgacagagatagtgaataactggtctgaatagcatcagtttaccgataggaatgtgaccttaatcaggtgataaactaactgtgactgcagccttggacatggaggggaggttgaggcaagcaccttggccaataccaagtaaactatccaggttaactggcaatactgaagctaagaggtaattactatttcttgggaatctagtctcagngatttactccatcatctgtaagtttatgaaacattttccagtcacaagtcaaagtgcttcacttcaaacactgaaaagtgtactttattgcaggaactgaaatggaggaaagatctctcttcacaaggtaggtccacaaacaaacagtttaccattaagtcacttactttgtaaaaatagtgtaatatgcataacctcatagtttattaaaatcatcaacaaaagtttgtggtcagtatagtacaattaatatcaaacgaaagcaccagagacacagcgcaaccaccagtgagatttgttaatttttccaaaactaactccaacactcag

SEQ ID NO: 3505 - DNA, 661 bp, Homo sapiens
  PSD3
  misc_feature [331]..[331]: Chromosome 8, SNP identification no. = rs13276530
  misc_feature [331]..[331]: allele = a, in linkage disequilibrium with rs10503636, respectively
  misc_feature [331]..[331]: n is a, t, c or g
ccatcatctgtaagtttatgaaacattttccagtcacaagtcaaagtgcttcacttcaaacactgaaaagtgtactttattgcaggaactgaaatggaggaaagatctctcttcacaaggtaggtccacaaacaaacagtttaccattaagtcacttactttgtaaaaatagtgtaatatgcataacctcatagtttattaaaatcatcaacaaaagtttgtggtcagtatagtacaattaatatcaaacgaaagcaccagagacacagcgcaaccaccagtgagatttgttaatttttccaaaactaactccaacactcaggatacatgngctttcatcaagaaacatagagaccaaatgtataagaaataagaaaactgaaatttcattcattacataaaatctcagagtgacaaaccatgaacaatttaaagaaagtacgctgtcacactagagaagtggaaaacaaaataatttaagtaagagtagaggatatcatgctgtccttaaatattatgcttttaaagaatatttaatgacatgagaaaatgctcacaatgaaataaaaaggcagctaaaaacaaaactctaattccaatttgacattaaatattaaatagactagaatgaagtaaacagaagtgttaatagttatcacta

SEQ ID NO: 3506 - DNA, 661 bp, Homo sapiens
  PSD3
  misc_feature [331]..[331]: Chromosome 8, SNP identification no. = rs11774165
  misc_feature [331]..[331]: allele = t, in linkage disequilibrium with rs10503636, respectively
  misc_feature [331]..[331]: n is a, t, c or g
cattaaatattaaatagactagaatgaagtaaacagaagtgttaatagttatcactaggtaactgaagatacataatttctcacaataaaatttaactttcataataaggaaaataaccattgatataaaaaagaaattcaaggatttgtatcagattaccttgtgaagcaatggtatctgggttacaataaaaatatctattggagaagtgtattaaaactctctctcgttcttgagtttctcccacaagagagaatgctttaaagaaatacctacaagagaattaaaaatttaaacagtgaaattttcgaaaatgctatcacactcttncatagttaaaagtcaatttatataaacctaagatattaattatacaaagtaagatattatgaagttatctccccccaaaaaaatcatttactagacagccattcaatataaattggtattagtatttaaattctataaaaagcactgtgggaggccaaggcaggtgttcacttgaggtcaggggttcaaaaccagcctggccaacatggcgaaaccccatctctactaaaaatacaaaaattagccgggcatggtggtgggcgcctgtaatcccagctactcaggaagctgaggcaggaatcgcttgaacccaggaggcggaggttgcag

SEQ ID NO: 3507 - DNA, 661 bp, Homo sapiens
  PSD3
  misc_feature [331]..[331]: Chromosome 8, SNP identification no. = rs11775676
  misc_feature [331]..[331]: allele = t, in linkage disequilibrium with rs10503636, respectively
  misc_feature [331]..[331]: n is a, t, c or g
acccaggcaaactaacatgtatggtaaccctcaacaccttgaacagtttcccaatacacatgcctaccagttaaaataaattgcttcattatgataaaatctccatgaaaatacatttttaaatgcatgattttttcatcctacatcttcctttatagacttaacattacatggctgggtgtggtggctgaaacctgtaatccctgcacactgggaagccaaggggaggactgctttagcccaggagtttgagaccagcctggacaacacggtgagaccctcctgtctatgatgtaaacatttttttaaaaagagacttaacactaccatncagttttgtgaaatctatcccatcaggaaactgaataatcattatcgacagtataacctataataagaaaactcacagtagaaatttcttttaggcaattcatggttactttgtgttttcccatacaagtgacagaaatgtaaaatatttattccaagaactacgttaattacaatcaagtactttttataattatacaaaacacaaaacaaagcccttggagttgtgtttccatgtgtgcttttcctatcatgtagtaaaaacacatgtcaaagaaaggattttcttcttaattaaaccactactcactgctcatttcccagggaaaat

SEQ ID NO: 3508 - DNA, 661 bp, Homo sapiens
  PSD3
  misc_feature [331]..[331]: Chromosome 8, SNP identification no. = rs11775742
  misc_feature [331]..[331]: allele = t, in linkage disequilibrium with rs10503636, respectively
  misc_feature [331]..[331]: n is a, t, c or g
ccaaggggaggactgctttagcccaggagtttgagaccagcctggacaacacggtgagaccctcctgtctatgatgtaaacatttttttaaaaagagacttaacactaccattcagttttgtgaaatctatcccatcaggaaactgaataatcattatcgacagtataacctataataagaaaactcacagtagaaatttcttttaggcaattcatggttactttgtgttttcccatacaagtgacagaaatgtaaaatatttattccaagaactacgttaattacaatcaagtactttttataattatacaaaacacaaaacaaagcccntggagttgtgtttccatgtgtgcttttcctatcatgtagtaaaaacacatgtcaaagaaaggattttcttcttaattaaaccactactcactgctcatttcccagggaaaattcatggcatttatttaatcattctgtgcaaacaatgtaattataccacatatacagtactggcccaattttgttcaaatacaagaggcttattctaatgagaacacattttaaaaatttattacccaaaatcattccattcctcatgttactcattctccatatttgccccttttctactatgctgcccagtccagatgatttcacctaattttcctc

SEQ ID NO: 3509 - DNA, 661 bp, Homo sapiens
  PSD3
  misc_feature [331]..[331]: Chromosome 8, SNP identification no. = rs11780950
  misc_feature [331]..[331]: allele = g, in linkage disequilibrium with rs10503636, respectively
  misc_feature [331]..[331]: n is a, t, c or g
aagtgtaccccaagggttgtacatagaaaataataacagccacctagtcgagttgaattttatacataacttaggcaaaggcaaattagaagaatctcaaggagtgagaagaaatgacttcagctgcaagtggaataaaaagaccagtgggaacaacatgactcctttgccattcttcaggctgatgacatagaaacacagaagactggaaccaacagacaagagggcgggtacaaacgcacagcttccagggctgaaatacaagtcagaagtaagtacaccatcagcaaaaaataagtaaaaccctaaatcataaattgcctctgaaaanggaaaagaaaataattttgtccatcattatctatggcatttatttcctaggcattgtagagagcacatcatctaattcccaaagaaatgtaaatgagaagttattcagaagagccatagcacccaccatggtaccataaacctaataggttaacaatggttaggcatttactatgtgccagcctctgggcttcttcctagggattgaattgtcagtcttatgaaacaggcaatagtataacccattttacagatgggaaaactgaggcaaggagctggacatggtcagtgagactccaatgctttactacttttataagctttactacta

SEQ ID NO: 3510 - DNA, 661 bp, Homo sapiens
  PSD3
  misc_feature [331]..[331]: Chromosome 8, SNP identification no. = rs11778625
  misc_feature [331]..[331]: allele = t, in linkage disequilibrium with rs10503636, respectively
  misc_feature [331]..[331]: n is a, t, c or g
cagaagactggaaccaacagacaagagggcgggtacaaacgcacagcttccagggctgaaatacaagtcagaagtaagtacaccatcagcaaaaaataagtaaaaccctaaatcataaattgcctctgaaaagggaaaagaaaataattttgtccatcattatctatggcatttatttcctaggcattgtagagagcacatcatctaattcccaaagaaatgtaaatgagaagttattcagaagagccatagcacccaccatggtaccataaacctaataggttaacaatggttaggcatttactatgtgccagcctctgggcttcttccnagggattgaattgtcagtcttatgaaacaggcaatagtataacccattttacagatgggaaaactgaggcaaggagctggacatggtcagtgagactccaatgctttactacttttataagctttactactatccattttgctcctgccagtcatcttctggtatgtctgtcttcaatgattcaatgaatacgtatttaattccctatactgtgccacatattttaggtgcttggtagactacagtaagcaaaacagaattaaaaacttctaccctgggtggggaggggagctaaaaataaagaatttaataaataagtaaattctacat

SEQ ID NO: 3511 - DNA, 661 bp, Homo sapiens
  misc_feature [331]..[331]: Chromosome 8, SNP identification no. = rs4738328
  misc_feature [331]..[331]: allele = c, in linkage disequilibrium with rs10957657, respectively
  misc_feature [331]..[331]: n is a, t, c or g
agacagtgaatttgtcggcaccttgatcttgggctttccagcttccagaactgtgagaaataaatttcagttgtttataagccatagtagttttgttatagcaaccaaaatggactaagatgcatgtatattgataaatacatagagaattttcaaaagtctggaggaatgtctgctacgtatggtggttatgtatgcatgctttaacttttcctcagtaaaacaaaataaattttatattccatgtgaactatccatgacctggcagtcaggtgaatgagttagctgcctcccttcatgcactgactacctgtccacattggccatgacnggagattccagttacatgatccccatcaggacatgagtctaaagccactagcagagaaactcttcccagaccagagcaggtcagacagggtgggtggcctttttttctcttgcctgcaagagcagaagaggaagaaactgctcctcagatgggcaggttcatgaggacaaaggtggtgaccgtcctcagtagctctgctgtggaattaggacactcaggtgagagctgggacagcctgactgaagtcctactccacaaagcagtggtaaacgggcagtggggaggaggaatgtaagaccctttcccccaaggggtcaccaagtccagacc

SEQ ID NO: 3512 - DNA, 661 bp, Homo sapiens
  misc_feature [331]..[331]: Chromosome 8, SNP identification no. = rs10957657
  misc_feature [331]..[331]: allele = a, t
  misc_feature [331]..[331]: n is a, t, c or g
tttatctgacagtccaccagaactttttcttctgttatttactgacacttccagctgggtgctattgtcattgcatgtctcttcaggcatttcatattttacctcccttattattaggctggccatgccccgaggaaaggctagtttcacaaatctcatcccacctcttcagtaccaagtatggtgccttgtgcagtagatcattcctttgatatgtggttattgagagcctgctatgccaggcaccatgataggcattggagagtctgtagtgaccaggacagatgggcctcctaactcaatgtatgcacattctagaagatgagcaccntacactgtacaaataagtaaacaagagaatatgaaactgaacgcaaggaagtccacctgccattcgactcaatgagcccagtccagagagagcctgagatgggagaagtgaatctgctgtttcctcctgagcatctccccatgctaaatgagattcagctgttaatgtattttcttataaaacatcatgcttaaataaaagccaacggcttcctctggtgtttgaccacaggaaacatcaatgtgttccaatttggaggaaaaaatggttctatcaaacttactgagtgatggtatgtgtttttcaacatggtcacctctctagggaatt

SEQ ID NO: 3513 - DNA, 661 bp, Homo sapiens
  misc_feature [331]..[331]: Chromosome 8, SNP identification no. = rs6987005
  misc_feature [331]..[331]: allele = g, in linkage disequilibrium with rs10957657, respectively
  misc_feature [331]..[331]: n is a, t, c or g
atccctgccacatagtggtattcagtttgttgctcaggggataaacaagagcaccagaaatatgaaggtcgatgcaaatatcgagtattcatatttctttaataatccacattgtttgggagtcaactgatgtgatgctttgaagccagtgaaagctgaacgggcaaatctgaaataccttttcagagattcatctgcactctatgtacccaattaatgctgagccattagtcctttccgaagctgccaggatctattaagccatttaacttatccttccgcacttcaggatcagtcccaagggcattttttcaggcctgggcagccaaantataaatgacttaagtggtgagctttctctcactccccctgggaccccagtcctccaaagcagagctttaatggcgctaaagcactgtgaagcgaggaagcgcctaaagctgccactagagtcggcctcaaccctgaaggaaatcctggtttggagcccttgctcagggcgggccttctgaataactgcaacaggaaagcaccctctgtggggtgattggaatggtcccaggaaagtccccaggcctaaggatgcccctcaggaattcacaacagtgcttgaaatcccctccatttatcacttaataagtatttcttgagcacctactag

SEQ ID NO: 3514 - DNA, 661 bp, Homo sapiens
  misc_feature [331]..[331]: Chromosome 8, SNP identification no. = rs16889740
  misc_feature [331]..[331]: allele = g, in linkage disequilibrium with rs1384747, respectively
  misc_feature [331]..[331]: n is a, t, c or g
gcttcccaataatacacattacagcccagctatactggacttcccacacttcctagaacatgtcatgccctcaaatatgtgcatgcagataagttcttacagtgacattttatgtgctctcaaaaaaaaaaaaatggttgctgtcatgaccaactgctgtttcctcttcccaccatatttctcccttcatcatctccccttatccttaagggactcatataaaacatcatcttctttctgaattctcaaatgggacaaatttctcttgtatcattatagtttatttatgaaagtttttctcaaagtgtaacataagaatgtatattcaggngccaatactgtccccaggagccatgagtccctgagactcatgttttaatgttatgttttcattttgctgataatcgacaaataaaatataccagtttttaaacagaaaaaaagaatgtgcctgggagcttccaacagacagtatagttggattacaatgcgaaagggggaagaaggtaggcaggagccagatcatgtcaagcttcctaaactctccaggactctcatttctcatttacaaagttatgtatctggagaaaatgaattaaaagaacacttccagttctaaaatataaattccatgagcaattctaatttgttcattgcttta

SEQ ID NO: 3515 - DNA, 661 bp, Homo sapiens
  misc_feature [331]..[331]: Chromosome 8, SNP identification no. = rs1922327
  misc_feature [331]..[331]: allele = c, in linkage disequilibrium with rs1384747, respectively
  misc_feature [331]..[331]: n is a, t, c or g
ttttagagttagtttatgaactttcctctctcataacaggcttaatcatgataaaaacaagagtcatgtctaacagagatgacttttaaaggttgcttaataattttctgaagtttaattaaccatttctagttatatggctatttgggtcatttatgtattttattatcaaaaaatatcttgaatacaatctattttagtgttttaaaattttctttagaaagaaatttccaagaataagatgtataaaaaaatcatgttcttaaagcttttgatacatatttccagattgctttctaaaaagagaatagaaatttggctttctaccaanaatctatgagggtctacctcaccctatcttccaaattgttcaatattgaaatttttaaaagccttttctaatatgataggtttaaaaatatatttttgctttcaatttgtaaggcttgattaatactgggtttaaaattatatcctaattgtaaatatttataaagacaaatttggttataattctacttctgtcaatagcctgatcttaggttttactccttttatctatttaggtcctatatttatattatactttatataaatccatgttaaaaatcaatatattgttgatttaagatatttttgatttttagtgtattttgacata

SEQ ID NO: 3516 - DNA, 661 bp, Homo sapiens
  misc_feature [331]..[331]: Chromosome 8, SNP identification no. = rs13257963
  misc_feature [331]..[331]: allele = a, in linkage disequilibrium with rs1384747, respectively
  misc_feature [331]..[331]: n is a, t, c or g
tgaacattactcctatagaatacattcagtaatacattctactgattgactgtccgtacttcttgttttagaacattagcacgttgtatgaaaaactgtttgaatgaaccttttaaaatatttcttatgtattaagtttgtggggagccctaacccctaagaaatggtgtatctgtttgtgggaaattctcagaagaagctcttaagtgcaaaccatgtgaacctgtcccctgaaatgaggaatctgctgagaaaatggcaaagagttaaaagccaaagaataagccacggacaaggaacttgtaaaggatagcacctatatgcaaattgnagccaaagagatcagaacaaagtagatgagaaaccacatggcaattcaagatggctgcctatgaaacagacacaactcggtggtcttctctagctctttctgcgactcatcacttattcttgcgtttatttcatgaaatcatttctcagagtatggtttcacggtccttcactagattcagtatcatggccaccatgttttctggcatatatagagaggttaaataatcatgtgttgactgaacaaatggcagagattagggtataataagaaacttgctggctttgatgctagtggataaaaatagtttatgagctagacaagcaatta

SEQ ID NO: 3517 - DNA, 661 bp, Homo sapiens
  misc_feature [331]..[331]: Chromosome 8, SNP identification no. = rs1014313
  misc_feature [331]..[331]: allele = a, in linkage disequilibrium with rs1384747, respectively
  misc_feature [331]..[331]: n is a, t, c or g
tttcttttgtcatttttgatcttttatttaacaaactcatgtgctgacattcaatatcaaattgattttaacttgtttgttctaggtttttttctctgtctctctctgtctctttctctttctttctaattttgtttcctgaaatgtaaaatgttatgatttatttgaatttccatatctcgtggaatatttttgggagacttaagttctcattatgaattgttgaataatacatggctttgatgtgctgatgaaagtgtgtttttttctggtgtctgaaacaatattgagggctaaaatatccctgaagcataagtcactacatgttatnaagttaagcaactagaaaggagtccttttatctgaaccatttcagtttcaggtgacagaaatttaaactgaagatggtgagagacagagaagtgagagaaaaataatatattgactggcttgtgtaacaaaaaagcctacaagtagaccttgatttgcatctacaataagctcacacagtgttgtcagaacacaatttctctacattttttagctctgctttgctctgtgttaggtgtagtctcagtcaggctctctctttatagtgaaaggatatttagcagcagtttcacatatacttcctacaagttcagcatatttaactgaaagg

SEQ ID NO: 3518 - DNA, 661 bp, Homo sapiens
  misc_feature [331]..[331]: Chromosome 8, SNP identification no. = rs13261113
  misc_feature [331]..[331]: allele = c, in linkage disequilibrium with rs1384747, respectively
  misc_feature [331]..[331]: n is a, t, c or g
aaatggtctgttttgatacaaaatatcatttgattttaatttacactgccatttgtaataacggttttcattttaaatctttagtcacaaactactagatgatttagatgaaaataggaattttgaaagtccacaaaatcctattcaacacttatttctaacatctctattattcagcttgccaataaaatccagttgctttatctctctcttcaagaatgagaactttttgttttctttctcagagaggaacttaaaaagtgatgaagcagtctcacttcatgagatggtgccttttacacaccagctgtatctgtgagctatttgattnctagaaccaatggcctgtgctctgcagtgtgtagttatctaaacatggggtagatccattttgcttgcccaaggagacagactactgggtctttataatttattaagtgttaaaacctacacgaagttataatatgtaatcctattttattgcacaagcaaagaagagagaagaaaattttagtttaactacctgacctctcgcagaatttgtctgctgtgataagataaattaagtgttctctccgtttctcttcagtttcatttgctctgctcccaatagtgtttcaacttaacttctatcattcaatgaagtttcagaaaagaaaac

SEQ ID NO: 3519 - DNA, 661 bp, Homo sapiens
  misc_feature [331]..[331]: Chromosome 8, SNP identification no. = rs1240118
  misc_feature [331]..[331]: allele = g, in linkage disequilibrium with rs1384747, respectively
  misc_feature [331]..[331]: n is a, t, c or g
gccgtagatcactccagattggttatttgtttctatattttatcctctattttcccttcaggaaacactatatgctttttgtcagtcatggtgttaatggcacaatagaaatattccaaaaaatcaacccaggaagcaaaaatgaacaaatgtttatagaatagcagataagctctaacaatttttaatgcatattatttaatgtactgagcagctagaattcatacagtcagttcccaactaaaatggtaaacaattaagatcaagtgcatgctgccttctgcatttttgaaaaaatcataatgggaggcagattagaccaagaaaaggnaaacattttaagaaaattgctgcttaagaacttccatccaccagtaaaggagctgctgctgtagtcaaaagccacataaaaatattagtttccaaacctatgtaatagacagaaacttaaattttaattgtagctgaaagctgtgcttattcataaactgcaagaatctctattgccatggagttgaggattaaagaaaacagttcataaatgacatattgctgaacttttactaacaggattttactccccagtgagttttactgccaggtgttacgcacatttattttgaacagatgttctgtggcctgctcttctcaaatgtcacag

SEQ ID NO: 3520 - DNA, 661 bp, Homo sapiens
  misc_feature [331]..[331]: Chromosome 8, SNP identification no. = rs1240117
  misc_feature [331]..[331]: allele = c, in linkage disequilibrium with rs1384747, respectively
  misc_feature [331]..[331]: n is a, t, c or g
gctagacctggcattctgacccatgacatttgactttgtgtcctgtgtttaaccacatcaatatatatctgtcatgagttgtccaaaccatggggtatgccgtagatcactccagattggttatttgtttctatattttatcctctattttcccttcaggaaacactatatgctttttgtcagtcatggtgttaatggcacaatagaaatattccaaaaaatcaacccaggaagcaaaaatgaacaaatgtttatagaatagcagataagctctaacaatttttaatgcatattatttaatgtactgagcagctagaattcatacagtcanttcccaactaaaatggtaaacaattaagatcaagtgcatgctgccttctgcatttttgaaaaaatcataatgggaggcagattagaccaagaaaaggcaaacattttaagaaaattgctgcttaagaacttccatccaccagtaaaggagctgctgctgtagtcaaaagccacataaaaatattagtttccaaacctatgtaatagacagaaacttaaattttaattgtagctgaaagctgtgcttattcataaactgcaagaatctctattgccatggagttgaggattaaagaaaacagttcataaatgacatattgctgaactttta

SEQ ID NO: 3521 - DNA, 661 bp, Homo sapiens
  misc_feature [331]..[331]: Chromosome 8, SNP identification no. = rs1240116
  misc_feature [331]..[331]: allele = c, in linkage disequilibrium with rs1384747, respectively
  misc_feature [331]..[331]: n is a, t, c or g
tcaatattataaactgagatttatagggtaatttagagggtaacttgtccgctagcacatacatgggcagctagacctggcattctgacccatgacatttgactttgtgtcctgtgtttaaccacatcaatatatatctgtcatgagttgtccaaaccatggggtatgccgtagatcactccagattggttatttgtttctatattttatcctctattttcccttcaggaaacactatatgctttttgtcagtcatggtgttaatggcacaatagaaatattccaaaaaatcaacccaggaagcaaaaatgaacaaatgtttatagaatancagataagctctaacaatttttaatgcatattatttaatgtactgagcagctagaattcatacagtcagttcccaactaaaatggtaaacaattaagatcaagtgcatgctgccttctgcatttttgaaaaaatcataatgggaggcagattagaccaagaaaaggcaaacattttaagaaaattgctgcttaagaacttccatccaccagtaaaggagctgctgctgtagtcaaaagccacataaaaatattagtttccaaacctatgtaatagacagaaacttaaattttaattgtagctgaaagctgtgcttattcataaactgcaa

SEQ ID NO: 3522 - DNA, 661 bp, Homo sapiens
  misc_feature [331]..[331]: Chromosome 8, SNP identification no. = rs1240115
  misc_feature [331]..[331]: allele = a, in linkage disequilibrium with rs1384747, respectively
  misc_feature [331]..[331]: n is a, t, c or g
tttttgcttcctgggttgattttttggaatatttctattgtgccattaacaccatgactgacaaaaagcatatagtgtttcctgaagggaaaatagaggataaaatatagaaacaaataaccaatctggagtgatctacggcataccccatggtttggacaactcatgacagatatatattgatgtggttaaacacaggacacaaagtcaaatgtcatgggtcagaatgccaggtctagctgcccatgtatgtgctagcggacaagttaccctctaaattaccctataaatctcagtttataatattgaatgagagtgataaaacccaacncaggacttctccaaggaatgactagaataatgtatacaaataatttggtatgtggtaattgcaaaacaaagaatagattttaataattataaatgtatgtctgtgttatttactataatttcttggtcataatatttgtgtgaatttatctatatacacatatccagtgtaaaatagtcatctatctatctatctacagtgggagacccagagagataataataaatatatacagaatgaaagatatatcattataagtgataaaataaaaaatataatgcaatggatttataatatcagctttatggtataatgtgactttctcagaat

SEQ ID NO: 3523 - DNA, 661 bp, Homo sapiens
  misc_feature [331]..[331]: Chromosome 8, SNP identification no. = rs10955882
  misc_feature [331]..[331]: allele = g, in linkage disequilibrium with rs1384747, respectively
  misc_feature [331]..[331]: n is a, t, c or g
agttacaactgactgttcctgccgaaaccaatcagttcactgaaacaggagagagagatttcttctgagagcagtaatttatcaatttttctctagggtacttgtcatttccagtcctaatttaaatattcctttctacctcctttattataacttctcagaagctttggctttactctgatttgcctttttatctgccatagttcttagcatattgaacacacatataaatattcaaataagggcagaaatcagagtactacagacatgtagatttattgtggagcttctcaaagagaccttacctcttgataaactaccttaaaaatanttaaaacacaaacgagttaaagatcaaggaaaccttctgaagcaaaacagaaaacttagaagctgtaaaaataaggaaaataaggaaaagatacatttgattgcatggaagtgtaaaaaatgtcgtatgacaaaaaacattagaagagaggtcacattagaagtgaaaacatttagttctataaaacatgaatttgtctctataatatagaaataaatctttaaatgggtagggataaaagatagtcaaacataggcaacaatgcagaaaggtaatttacagattaggacggggctcagcctcaataattagtaaaatgtatattaaagc

SEQ ID NO: 3524 - DNA, 661 bp, Homo sapiens
  misc_feature [331]..[331]: Chromosome 8, SNP identification no. = rs13254636
  misc_feature [331]..[331]: allele = g, in linkage disequilibrium with rs1384747, respectively
  misc_feature [331]..[331]: n is a, t, c or g
ctcttgataaactaccttaaaaatatttaaaacacaaacgagttaaagatcaaggaaaccttctgaagcaaaacagaaaacttagaagctgtaaaaataaggaaaataaggaaaagatacatttgattgcatggaagtgtaaaaaatgtcgtatgacaaaaaacattagaagagaggtcacattagaagtgaaaacatttagttctataaaacatgaatttgtctctataatatagaaataaatctttaaatgggtagggataaaagatagtcaaacataggcaacaatgcagaaaggtaatttacagattaggacggggctcagcctcantaattagtaaaatgtatattaaagcaattataaggtgtcactttaccactgaaattgattaaaaatagtaacactcattgctgacagtatatggggaaaaatgtgctcttctatatggctgaggaaaataagattagtagaagccttcagaagaagaaatatagctatgtgtactaaattaaaaatacacataatgttcaaccccacaatggcattcttcttaagctaccacatgaaatggaaaggctacaacatctaggaacaaggaagtttatcacaacaagatattcagcaaaacaaaacaaaaatctagaaataaattgaaagcta

SEQ ID NO: 3525 - DNA, 661 bp, Homo sapiens
  misc_feature [331]..[331]: Chromosome 8, SNP identification no. = rs3886733
  misc_feature [331]..[331]: allele = g, in linkage disequilibrium with rs1384747, respectively
  misc_feature [331]..[331]: n is a, t, c or g
taactgactcaaattgtgatagggtttacagaaacgcctagtggcttatgaagcatatgtgtgtctgagtgtctctgtgtatgttgcgtgtgtgtatttatgtaggtgtgtggtgttaccttagagttgcttattgtctatatcaatctccttatttggcatggtttagatctttatttgggaatcctttttgtacaacctttgtgatttgggtgcttctagagtaatgtgaatattgaatactctctttagaaatctttatcttgattccgtgtattcaaactttgaatatttttaatttccaacttttatttcaaaatgatcaacaccntctatttttgtttccctgacaacatgaaggaggcacatggtccacaacagcaactacttgattgtgttttttttttttaatattactctttcacttctctgactacaggcaaccaatgcaaatagtgcagtacatttgtttccactctgtttttttccatgctcagataagcacataaaaatatacagtttcttgtttgcatggctttatgtaaattcatccatattacatacatttctctgcatcttgctttagtcacttaaaatatattgaggaaatagctccagctaactagtataattataaaccatctatggtatgaaaatatcc

SEQ ID NO: 3526 - DNA, 661 bp, Homo sapiens
  misc_feature [331]..[331]: Chromosome 8, SNP identification no. = rs1240113
  misc_feature [331]..[331]: allele = t, in linkage disequilibrium with rs1384747, respectively
  misc_feature [331]..[331]: n is a, t, c or g
tgtcttgcatttaggattttgtcgtagctacaacaaagctacgacaaaggagaaaataagaaattctttagtctccctgtctaacttactactatagaaagctgtccagaattaaactctggttttctcttgtcaggttgcgttatagagcctggtcttccgacaggagagatgagtgtgacaacatggactggaggtggaggaagataaatcaaattcaattgatcactttcattccagaggacaagctaattccctatagagagaattagctgataactgactcaaattgtgatagggtttacagaaacgcctagtggcttatgaagcntatgtgtgtctgagtgtctctgtgtatgttgcgtgtgtgtatttatgtaggtgtgtggtgttaccttagagttgcttattgtctatatcaatctccttatttggcatggtttagatctttatttgggaatcctttttgtacaacctttgtgatttgggtgcttctagagtaatgtgaatattgaatactctctttagaaatctttatcttgattccgtgtattcaaactttgaatatttttaatttccaacttttatttcaaaatgatcaacaccttctatttttgtttccctgacaacatgaaggaggcacatggtccacaacagcaac

SEQ ID NO: 3527 - DNA, 661 bp, Homo sapiens
  misc_feature [331]..[331]: Chromosome 8, SNP identification no. = rs12171681
  misc_feature [331]..[331]: allele = t, in linkage disequilibrium with rs1384747, respectively
  misc_feature [331]..[331]: n is a, t, c or g
taaagagagtattcaatattcacattactctagaagcacccaaatcacaaaggttgtacaaaaaggattcccaaataaagatctaaaccatgccaaataaggagattgatatagacaataagcaactctaaggtaacaccacacacctacataaatacacacacgcaacatacacagagacactcagacacacatatgcttcataagccactaggcgtttctgtaaaccctatcacaatttgagtcagttatcagctaattctctctatagggaattagcttgtcctctggaatgaaagtgatcaattgaatttgatttatcttcctccanctccagtccatgttgtcacactcatctctcctgtcggaagaccaggctctataacgcaacctgacaagagaaaaccagagtttaattctggacagctttctatagtagtaagttagacagggagactaaagaatttcttattttctcctttgtcgtagctttgttgtagctacgacaaaatcctaaatgcaagacatcctttttcagagagtacaaaatgtatgtcagactatcttactacaggaccagaagggaggggcaatgaattatgggcaaacgagtcattttccaggtgatctcttttccattaaattcactgagacagcttct

SEQ ID NO: 3528 - DNA, 661 bp, Homo sapiens
  misc_feature [331]..[331]: Chromosome 8, SNP identification no. = rs6990822
  misc_feature [331]..[331]: allele = g, in linkage disequilibrium with rs1384747, respectively
  misc_feature [331]..[331]: n is a, t, c or g
atttaaacctcagtatggcaaatctttcataaagctattgaaataacaacacaaacatatagaaaatggtcagaaagataccctggtgctcatgctacactgcatgaaactagaataaaccaattgcttaggcaacaggcaactatttgaatactgaaatcttaaaggaataaaaactctaggaaatttcaattcatcataatacagaccagtagaggaaaatgatgcatgggaagtcaaaaccacagataagcgcacaccatttgaatgttggatgtttttccaagagagagtcaatattgacatgtggaattacatatgcatgtactantgtgtgtacacacatacccatatgttctgtgacaggatattgggatgccagtggaaatcagttcggaaagtaaatctgctgtaaataatacataaaaatggaataaataagcttttattaccacttacatgaaatatattcctataaaaagaaggaattcatgtttaaacgatgtaaagtaatgaaatttttgaaaagtagcttttagtgaatatttgaaagaaggatatgggtacatagccattcaccacataattttttagtcaacaatggaccatatatacaatggtggtcctctatgattataatactatatttttactgtaactt

SEQ ID NO: 3529 - DNA, 661 bp, Homo sapiens
  misc_feature [331]..[331]: Chromosome 8, SNP identification no. = rs1922312
  misc_feature [331]..[331]: allele = t, in linkage disequilibrium with rs1384747, respectively
  misc_feature [331]..[331]: n is a, t, c or g
taactcacagtcatcctctccaccccaaacttcatcaccctggatgactttaatggccaagttaagttaatgatcaatctagtacatattctttttttttgtttcttcaagatttttgtatctatattacttcaaccaaatttctttcatccttatccttaactttcagaaatgtttgacattgttgacaactccttctcattccatggcctccatgactgacctaatttatttaggcttctctgatcagctctttatttatcttgtttttcttagcttttccttaaacgattctgtttctcaaggctcaactcaaggtcttctgtttccnctaagatatgtcacctactaaatattattatctatctaactccaggcgtaactgagctcttgtgagctttgtactcatacattatatttctttgaagccaaaatcctatctagtttaagacacatcgttattttgtctatttaaaaaatgctgtcgaattactccagtaagtttttcttaatatttattatgcttattaaaatatattttaggcatatttatacaaatgtcttactatatatcaatgtcgagcatatataaaaattttctagtgaaattagtgggttaagaatttctaaaataattttacattcagacacttctgaataa

SEQ ID NO: 3530 - DNA, 661 bp, Homo sapiens
  misc_feature [331]..[331]: Chromosome 8, SNP identification no. = rs11998037
  misc_feature [331]..[331]: allele = a, in linkage disequilibrium with rs1384747, respectively
  misc_feature [331]..[331]: n is a, t, c or g
tagtttaagacacatcgttattttgtctatttaaaaaatgctgtcgaattactccagtaagtttttcttaatatttattatgcttattaaaatatattttaggcatatttatacaaatgtcttactatatatcaatgtcgagcatatataaaaattttctagtgaaattagtgggttaagaatttctaaaataattttacattcagacacttctgaataatttttttactcagacttactaatgtctgagttttcccttataacattatcttccataccatcataagtattagtaatacagcatttttaagtgctttagtggtatctcagnaatattattccaaactctggatacaattctgcaaaatttgatgcatataccttcttgaacttacaagatgtcattaaacagttcctaagacaacaatcaggattcacgtaagagccttcacaaatatctcttacatggtttttatctgaaacattaaaaaattgcagatgtccagtcatgacaacaggaataacaactaaggaaacactaagaatgacaaccacatcaaaattgccacttgagcaattgtgattcaaagatgtcattgattaagatgcattccaatgacaaaaatgcaaaaattaaaaagatgtgtcaaagtcagtgagg

SEQ ID NO: 3531 - DNA, 661 bp, Homo sapiens
  misc_feature [331]..[331]: Chromosome 8, SNP identification no. = rs6469750
  misc_feature [331]..[331]: allele = t, in linkage disequilibrium with rs1384747, respectively
  misc_feature [331]..[331]: n is a, t, c or g
taatccaaattctccagattggacattcataacatatgtgctctcctgtatgtatgttatgcttcaataaaaagtttttaaaatctataagagccaaaattcttcggaatgttctctttatatatcagatggttttcatggagtatgtgattaaaactatcaaccacattaaagtacattcccttaattcatgactgttgatgcagctctgtgaggagacagatgcagagcacataagtcctctcttatacacagaagtgagagaagtttctaaaggtagatcactgaccagagtttttgagttattagaggtgctccagagatttctttnagacagacagtcaccactggcagtacattccagtgacacagaatgagtcacaaaacttgcttgcttgtgtgccatattcaacctgctcaacaaactcaatctatcactttaggggagaacaactactgtgtttaagttggcagataaaatggttgcattcaaagccaaactggagttatgggggtgacgagtaaacatttttgacctgtttcaaacactagcagaaattctgaaagagattgaaccagggccttcttgctcccatctggtgaatgatcacctgtctcagctttcaaaagagtgtgagcattacttccaaaccagaaactt

SEQ ID NO: 3532 - DNA, 661 bp, Homo sapiens
  misc_feature [331]..[331]: Chromosome 8, SNP identification no. = rs6469751
  misc_feature [331]..[331]: allele = g, in linkage disequilibrium with rs1384747, respectively
  misc_feature [331]..[331]: n is a, t, c or g
ccttaattcatgactgttgatgcagctctgtgaggagacagatgcagagcacataagtcctctcttatacacagaagtgagagaagtttctaaaggtagatcactgaccagagtttttgagttattagaggtgctccagagatttcttttagacagacagtcaccactggcagtacattccagtgacacagaatgagtcacaaaacttgcttgcttgtgtgccatattcaacctgctcaacaaactcaatctatcactttaggggagaacaactactgtgtttaagttggcagataaaatggttgcattcaaagccaaactggagttatgngggtgacgagtaaacatttttgacctgtttcaaacactagcagaaattctgaaagagattgaaccagggccttcttgctcccatctggtgaatgatcacctgtctcagctttcaaaagagtgtgagcattacttccaaaccagaaacttccccaaactgggaaggaatggatttacaacccatttgtgaataagcccagtaaatcacctttgtccgtggtaagaggattaactgtttgagatcataaatgatggtggccttaaaagtatgtttgagacaacttcaaatctccatatgttcagattaaagtcaaggcagaatatcctgaga

SEQ ID NO: 3533 - DNA, 661 bp, Homo sapiens
  misc_feature [331]..[331]: Chromosome 8, SNP identification no. = rs11988832
  misc_feature [331]..[331]: allele = g, in linkage disequilibrium with rs1384747, respectively
  misc_feature [331]..[331]: n is a, t, c or g
gtgaatgatcacctgtctcagctttcaaaagagtgtgagcattacttccaaaccagaaacttccccaaactgggaaggaatggatttacaacccatttgtgaataagcccagtaaatcacctttgtccgtggtaagaggattaactgtttgagatcataaatgatggtggccttaaaagtatgtttgagacaacttcaaatctccatatgttcagattaaagtcaaggcagaatatcctgagattgctacaaaaacactaaagagcttgtttccatttcgaacatcccatttttgaaagaggggttttctgtagtgacagtaaccaaaatnaaattacaaagtagagtgaacataagcaacacacttcgggtgtcactgtctctgatcatccccagatgggaccatctagttgcaggaaaacaagctcagggctcccactgattctacattatggtgaattgtataattatttaattatatatcacaatgtaaatggaataataatagaaataaagtgcacagcaaatgtaatacccttaaatcatcctgaaactatccactcaccaacaccctggtctgtagaaaaattgtcttccatgaaactggtccctggtgccaaaaaacgttacatttaaaagaaaatactgatttaaccaacca

SEQ ID NO: 3534 - DNA, 661 bp, Homo sapiens
  misc_feature [331]..[331]: Chromosome 8, SNP identification no. = rs11986450
  misc_feature [331]..[331]: allele = a, in linkage disequilibrium with rs1384747, respectively
  misc_feature [331]..[331]: n is a, t, c or g
ttacaaagtagagtgaacataagcaacacacttcgggtgtcactgtctctgatcatccccagatgggaccatctagttgcaggaaaacaagctcagggctcccactgattctacattatggtgaattgtataattatttaattatatatcacaatgtaaatggaataataatagaaataaagtgcacagcaaatgtaatacccttaaatcatcctgaaactatccactcaccaacaccctggtctgtagaaaaattgtcttccatgaaactggtccctggtgccaaaaaacgttacatttaaaagaaaatactgatttaaccaaccactgntttaaccactgatttaacaaatagaaaaatttaagatattttgaggattagttgtgttgcaggaactattattcactgaaatctatattctctttaactttgtggacacacagcttgactgcacactcggtctcccttgcagtagccatttaattgagcaatagataatacgctgggatgaaagtaaagcatttcgcttacaagctcgcttcataagaatctcctaagcatatttctttttgctttagtcaacttctgattggctggaatgtaaatgagtggagtgattttataagccacctattgtaactgtgatgtaagcaagaaata

SEQ ID NO: 3535 - DNA, 661 bp, Homo sapiens
  misc_feature [331]..[331]: Chromosome 8, SNP identification no. = rs1922314
  misc_feature [331]..[331]: allele = c, in linkage disequilibrium with rs1384747, respectively
  misc_feature [331]..[331]: n is a, t, c or g
tataattatttaattatatatcacaatgtaaatggaataataatagaaataaagtgcacagcaaatgtaatacccttaaatcatcctgaaactatccactcaccaacaccctggtctgtagaaaaattgtcttccatgaaactggtccctggtgccaaaaaacgttacatttaaaagaaaatactgatttaaccaaccactgttttaaccactgatttaacaaatagaaaaatttaagatattttgaggattagttgtgttgcaggaactattattcactgaaatctatattctctttaactttgtggacacacagcttgactgcacactnggtctcccttgcagtagccatttaattgagcaatagataatacgctgggatgaaagtaaagcatttcgcttacaagctcgcttcataagaatctcctaagcatatttctttttgctttagtcaacttctgattggctggaatgtaaatgagtggagtgattttataagccacctattgtaactgtgatgtaagcaagaaataaactttttttgcaagcttgtccaaccaaccttatttttttgttgttctattttgttttgttttaggcttttagcagcctgaagccttggtttttagtttctgtctctagtggtaagcagaaaagaggc

SEQ ID NO: 3536 - DNA, 661 bp, Homo sapiens
  misc_feature [331]..[331]: Chromosome 8, SNP identification no. = rs2222882
  misc_feature [331]..[331]: allele = t, in linkage disequilibrium with rs1384747, respectively
  misc_feature [331]..[331]: n is a, t, c or g
agaatctcctaagcatatttctttttgctttagtcaacttctgattggctggaatgtaaatgagtggagtgattttataagccacctattgtaactgtgatgtaagcaagaaataaactttttttgcaagcttgtccaaccaaccttatttttttgttgttctattttgttttgttttaggcttttagcagcctgaagccttggtttttagtttctgtctctagtggtaagcagaaaagaggcatgaggaagaggctttactggcccaaacagaaacagaaactaagaaccaatgactgtattcccacctctggacacccttagaaggcantgtagatatctgggattatttgttagagaagctaattttacattaatatagtgaggctgtaaagtctgtggaggacaaaattttacatattaactagtcaaaaggagaataaagatttgctttaaaaattaaaaaatctactgaggtaaaggtctaaatacatgccttaactatgttatttattttattcaatattcattgcatgtggactctgagaaacagtgatgagtgatgagtcagacagtaagatatagctcatttcctcaaaagtcttacttcagatgtggttaatttcctcagaagacatttgtgaatgttcttcaaaataag

SEQ ID NO: 3537 - DNA, 661 bp, Homo sapiens
  misc_feature [331]..[331]: Chromosome 8, SNP identification no. = rs16890421
  misc_feature [331]..[331]: allele = c, in linkage disequilibrium with rs1384747, respectively
  misc_feature [331]..[331]: n is a, t, c or g
ggtttttagtttctgtctctagtggtaagcagaaaagaggcatgaggaagaggctttactggcccaaacagaaacagaaactaagaaccaatgactgtattcccacctctggacacccttagaaggcattgtagatatctgggattatttgttagagaagctaattttacattaatatagtgaggctgtaaagtctgtggaggacaaaattttacatattaactagtcaaaaggagaataaagatttgctttaaaaattaaaaaatctactgaggtaaaggtctaaatacatgccttaactatgttatttattttattcaatattcattgnatgtggactctgagaaacagtgatgagtgatgagtcagacagtaagatatagctcatttcctcaaaagtcttacttcagatgtggttaatttcctcagaagacatttgtgaatgttcttcaaaataagaaaattgagtaatcagggtccaaaattctgcaccataaactgttgcgggaagtcagggaccccaaacggagggaccgatggaagccatggcagaagaacataaattgtgaagatttcatagacaattattagttccccaaattaatacttttataatttcttacacctgtctttcctgcaatctctgaacataaattgtgaa

SEQ ID NO: 3538 - DNA, 661 bp, Homo sapiens
  misc_feature [331]..[331]: Chromosome 8, SNP identification no. = rs1922315
  misc_feature [331]..[331]: allele = g, in linkage disequilibrium with rs1384747, respectively
  misc_feature [331]..[331]: n is a, t, c or g
gtgggacatggaccttcattagcaattctagtttcaccctgaccttgtgatcttgccttgaccttctgccttgtgatcttttattacccttgaagcatgtgatctctgtgacccacaccctatttgtacactccctcccctttgaaaatcgctaataaaaacttgctggttttgtggctcagggggcatcagggaacctgccaacatgtgatgtctcccccggacacccagctttaaaatttctctcttttgtactctttccctttatttctcagaccggccgacacttagggaaaatagaaaagaacctacgttgacatactgagggctnattcccctgataataaaccatggtcaaaataattttagcataggacattcaaagcatattaaatcaaatgttcagcataatgataaataaattccaaaaagtatccttgcaatcttaaatttcagaaatatttgtgggactttgtgaaaccccctccaagctcggttatttgcaaaatatatgataacaaactgcattacctgatttgctaaacaaaggttttggctataagtcaacctaactgtgaagaacatttttcaaaaatgatgatttgggttgaaaaataattgtctttgaatgcttctttctgacaataaagaatgaggcaat

SEQ ID NO: 3539 - DNA, 661 bp, Homo sapiens
  misc_feature [331]..[331]: Chromosome 8, SNP identification no. = rs10447965
  misc_feature [331]..[331]: allele = c, in linkage disequilibrium with rs1384747, respectively
  misc_feature [331]..[331]: n is a, t, c or g
tcagaccggccgacacttagggaaaatagaaaagaacctacgttgacatactgagggctgattcccctgataataaaccatggtcaaaataattttagcataggacattcaaagcatattaaatcaaatgttcagcataatgataaataaattccaaaaagtatccttgcaatcttaaatttcagaaatatttgtgggactttgtgaaaccccctccaagctcggttatttgcaaaatatatgataacaaactgcattacctgatttgctaaacaaaggttttggctataagtcaacctaactgtgaagaacatttttcaaaaatgatganttgggttgaaaaataattgtctttgaatgcttctttctgacaataaagaatgaggcaatgatctgttagggtcaaatccagttggtgacagtgaaatgttataatcagcatagtgcaagcttttctactctcagtggcagtcggcaggtatttatctcgatcagaagtgtgttcattaggtgataattaatgtttgagttaaaaaaataagatatttcaaagtgatgaaaaccatctgatatataaagagaacagttttattaatgctggcccttatagatcttaaaacctttttattgaaggataacatacatacaggagagcacatat

SEQ ID NO: 3540 - DNA, 661 bp, Homo sapiens
  misc_feature [331]..[331]: Chromosome 8, SNP identification no. = rs10088616
  misc_feature [331]..[331]: allele = t, in linkage disequilibrium with rs1384747, respectively
  misc_feature [331]..[331]: n is a, t, c or g
gccctttatgcagtacctgttcaacatttttgcccatttttgagtgagggaggttgtctctcttttgcttattgattcataggaactgtatgtagagacacacataaatatatgtgcatgcctatttagatacaagttctttgttagatagatgtattgtgaatatcttctctaactttggtttgcctttttacttttttaattgtatgtttcaatgaacacaagttcttagttttatctaattttcattttttcatttttatggacttgtgttttttctcttgttttactaatttttgcctactctagagttgcaaagtttttcctatgnttttcacaaaaattgtattatctttcattataaaatccatttaaagttattttttcacataatattgatataaggtattcagttgcctcaaggccatttattgaaaagtatatacttttcccataacatgtgagtcatgtttttcacaaatcaggtaagaataaatatgtggctctctttctggactttctattatgttccattggttagtttatttatccttgcacaaattccatgttttcttaattattacaggtttataataggtcctaatatctagtaatgtagactttcattagctttgtttactttcttctaaattgttttggc

SEQ ID NO: 3541 - DNA, 661 bp, Homo sapiens
  misc_feature [331]..[331]: Chromosome 8, SNP identification no. = rs13270618
  misc_feature [331]..[331]: allele = c, in linkage disequilibrium with rs1384747, respectively
  misc_feature [331]..[331]: n is a, t, c or g
aacttaatttttttggaagtaaaaaataacaatccttttttgctttattagtattcctttgactcttaaggagtttaagctttctcattattttctatggcacatttaaatttcttcttttatctgtttgtttctttaacttatctagtaggttcaggggtatacgtgcaggacagttagagaggtaaattgcatgtcatgggagtttggtttacagattatttcattacccaggtaataagcatagtacccaaaaggtagctttttgatcctcttcctcctcctgccctccaccctcaagtaggccccagtgtctgttttttccttcttngtgtttacatggtctcaatatttagctcccacttaaaagtgagaacgtgctatatttggtattctggtccagcattagtttgcttaggcctctggttgcatccatgttgctgcaaaggacaagatctcattctcttttatgcctgtgcagtattccatggtgtatatgtaccacgttttccttatctaatctactgttgacaggacatttaggttgatttcatgtctttaccattgtgaatagtactgtgatgaacatatgagtgcatgtgtccttatggtagaatgatttatattcctttggttatatacccaataattagattgcttg

SEQ ID NO: 3542 - DNA, 661 bp, Homo sapiens
  misc_feature [331]..[331]: Chromosome 8, SNP identification no. = rs12155697
  misc_feature [331]..[331]: allele = t, in linkage disequilibrium with rs1384747, respectively
  misc_feature [331]..[331]: n is a, t, c or g
aatttatattcccatcagcagtgtataagtgttcccttttctccacaaccttttgacttttagataataccctttctgactggtgtgagatagtatctcattttggttttgatttgcatttctctaataattagtgatgttgagcatttttttgtacgcttgttggccatacgtatgtcttcttttgaaaagtatcttttcatgtcatttgcccactttttaatggagttgtttgttttttgcttgttaatttgtttatgttccttatagattctggatattagacctttatcagatgcatagtttgcaattattttctctctttctgtanattgtctttttactctcttgatagtttattttgctctgtagaagctcattgttttaattatatccaatttgttaatttttggttttcttgcaattgctttcaatgtctgtcatgaaatttttgccagggtctatggccagaatgttatttgctaggttaacttccaggatttttacagctttaggttttacatttgagtccttatccatcctgaattcatttttgtgtacggtgtaagaaggggttcaatctgctgcatatgtttagcctgttgtcccagcatcattaattgaatagggagccatttcccctttgcttgtttctgtcaac

SEQ ID NO: 3543 - DNA, 661 bp, Homo sapiens
  misc_feature [331]..[331]: Chromosome 8, SNP identification no. = rs7462329
  misc_feature [331]..[331]: allele = g, in linkage disequilibrium with rs1384747, respectively
  misc_feature [331]..[331]: n is a, t, c or g
catcctgaattcatttttgtgtacggtgtaagaaggggttcaatctgctgcatatgtttagcctgttgtcccagcatcattaattgaatagggagccatttcccctttgcttgtttctgtcaactttatcaaagattagataggtgtgcagcattatttcttggctgtctgttctattccattcatctatgtgtctatttttgtaccagtaccatgctgttttagttactatagtcttgcagtatagtttgaagtcagataacgagatgcctccagatttgttcttttttcttaggattgccttggctatctgggttctttcttggttccntatgaatttaaaatagtattttctagttctgcctgttaaaaatgttggtagtttcataggattagtattaaatctgtaaattgctttgggcagtatatccattttaatgatagtgattctttctattcatgagcatggcgtgtttttccatttacttctttcttctctgatttctttgagcagtattttgcaattgtcattgtaggtatctttaacctgtctggttagctgtattcctaagtattgtattctttttgtgagtattttaaatgaaattgcattcttgatttggctctcagtttgacagtgttggtgtacaggaattctact

SEQ ID NO: 3544 - DNA, 661 bp, Homo sapiens
  misc_feature [331]..[331]: Chromosome 8, SNP identification no. = rs7463333
  misc_feature [331]..[331]: allele = t, in linkage disequilibrium with rs1384747, respectively
  misc_feature [331]..[331]: n is a, t, c or g
ggtaatgtttccagcttttgcctgtttagaatgatgctggctattgagtttccatagatggctcttattattttaaagtgtggtcctcaatgcctcgtttgctgagagtttttaacattaagagatgttgaattttatcaaaagctttttctgcatctattgaggtgatcatgtaatttttgtttctagttctgatcatgtgataaatcacatttattgatttgcatatgttaagccagccttgcatctcagggatagagcttacctgattatggtagattggtgttttttcgtgtgctgctggattcagtttgctagtattttgtgaagnttttttttcgttgaagttcatcaaggatattggcctgaagtgttatttttttcttcttgtgtctctgccaggttttggtatcaagatgatgctagcctgagaataagctagggagcaatttttcctcctcaattttttggaactgattctgaaagaatagtttcagcttttttttatatatctggtaaaatttggcagtcattctgactggtgctgggcttgttctgtttggtagttgtatcactctgcttatacacagatataaagaactacctgagactgggtaatttataaataaacaaggtttagttgacccacagttctgcatgg

SEQ ID NO: 3545 - DNA, 661 bp, Homo sapiens
  misc_feature [331]..[331]: Chromosome 8, SNP identification no. = rs11992867
  misc_feature [331]..[331]: allele = t, in linkage disequilibrium with rs1384747, respectively
  misc_feature [331]..[331]: n is a, t, c or g
ttttctgcatctattgaggtgatcatgtaatttttgtttctagttctgatcatgtgataaatcacatttattgatttgcatatgttaagccagccttgcatctcagggatagagcttacctgattatggtagattggtgttttttcgtgtgctgctggattcagtttgctagtattttgtgaagattttttttcgttgaagttcatcaaggatattggcctgaagtgttatttttttcttcttgtgtctctgccaggttttggtatcaagatgatgctagcctgagaataagctagggagcaatttttcctcctcaattttttggaactgnttctgaaagaatagtttcagcttttttttatatatctggtaaaatttggcagtcattctgactggtgctgggcttgttctgtttggtagttgtatcactctgcttatacacagatataaagaactacctgagactgggtaatttataaataaacaaggtttagttgacccacagttctgcatggctgaggaggcctcaggaaatttacaattatggaagatgttgaagggtaagcaaggtatattttccatggtggcaggaggtggcaggggaccaccatacacttttaaaccatcagctctcatgagaacttactcattgtcatgaaaa

SEQ ID NO: 3546 - DNA, 661 bp, Homo sapiens
  misc_feature [331]..[331]: Chromosome 8, SNP identification no. = rs11989213
  misc_feature [331]..[331]: allele = t, in linkage disequilibrium with rs1384747, respectively
  misc_feature [331]..[331]: n is a, t, c or g
cagggatagagcttacctgattatggtagattggtgttttttcgtgtgctgctggattcagtttgctagtattttgtgaagattttttttcgttgaagttcatcaaggatattggcctgaagtgttatttttttcttcttgtgtctctgccaggttttggtatcaagatgatgctagcctgagaataagctagggagcaatttttcctcctcaattttttggaactgattctgaaagaatagtttcagcttttttttatatatctggtaaaatttggcagtcattctgactggtgctgggcttgttctgtttggtagttgtatcactctgnttatacacagatataaagaactacctgagactgggtaatttataaataaacaaggtttagttgacccacagttctgcatggctgaggaggcctcaggaaatttacaattatggaagatgttgaagggtaagcaaggtatattttccatggtggcaggaggtggcaggggaccaccatacacttttaaaccatcagctctcatgagaacttactcattgtcatgaaaaagcatggtagaaactgcccccatattccaatcacctcccttgacatgacaagatcttattcttttctcgtgcctgtgtagcattccatggtgtgtatattcat

SEQ ID NO: 3547 - DNA, 661 bp, Homo sapiens
  misc_feature [331]..[331]: Chromosome 8, SNP identification no. = rs1483365
  misc_feature [331]..[331]: allele = g, in linkage disequilibrium with rs1384747, respectively
  misc_feature [331]..[331]: n is a, t, c or g
ctgtgggcctagtcttcactgaacctcatcaaatggtgcccactgcactggcaccctagcacaaccaccccaggtccacctgagctctctggccaggagcagctttgcacttccctggtatggagctcccagggaagtgggagtaggcaggtcaccatttctcctgctttgcagccctagctcctattgtcctcaggctcaggggggagcatagtgatcacagactaacagggacacccagcaccttgcagctgccttacggaaaagcagtcagattgttttccatgtagggcctcctctactatgcctcactggacagggccccctgacntggtaccccaaggacccttccaccagggctttgggtcggtagcagctctgtgcttccctgggagggagctcccagagggagccagcaggctgctatttttgctgctcagcaaatcctatgaatatacacaccatggaatgctacacaggcacgagaaaagaataagatcttgtcatgtcaagggaggtgattggaatatgggggcagtttctaccatgctttttcatgacaatgagtaagttctcatgagagctgatggtttaaaagtgtatggtggtcccctgccacctcctgccaccatggaaaatataccttgcttacccttcaaca

SEQ ID NO: 3548 - DNA, 661 bp, Homo sapiens
  misc_feature [331]..[331]: Chromosome 8, SNP identification no. = rs1240082
  misc_feature [331]..[331]: allele = a, in linkage disequilibrium with rs1384747, respectively
  misc_feature [331]..[331]: n is a, t, c or g
agattcattttcaaattatgaccacaatatgatactcattatgattactgtttttgatcatttgcctagtctgtacaataatttaagaaaaatgtaaggaaaatatcacaatgagaaaagaatgaattaagctattgttacttacaaatagttgcatgcactgaagttccctccaagagaatcaacaattaattttttagaattaagagattttttcaaggttgctctatgtaagatcaatttaaatgaataaattctgcacccaagcaacaaacagaaaaagtatgcaactaaatagagaacattcataatagcaacaaaataagatgcntaagaataaacctaccagaatatgtaaaatacttatgcagaaatatataaaacattattgaaaagtaattaaaaatataaattgaaaatagcagtgttataatgatcaaatctctccaaatggatttataaatcagatttatttataaataacagtagggattttccggaaatttgacaagttaattctaaagtaataaaacaaatggcccagaagaactaagacactcctaaggaatgagaacaagatgggaggatttctcttccaaatattgcgttatggtaaaatttcagtgattaagataacatactattgattcagggaggatca

SEQ ID NO: 3549 - DNA, 661 bp, Homo sapiens
  misc_feature [331]..[331]: Chromosome 8, SNP identification no. = rs11780365
  misc_feature [331]..[331]: allele = t, in linkage disequilibrium with rs1384747, respectively
  misc_feature [331]..[331]: n is a, t, c or g
atttcacgaacagtaatgaaacaacttgttatttatgtggaatagtggaatttaagtggaaagaatgattctgaataagttaaagtggtgagtatggaagtcactatctaactcttttaacatcaaatacaagaaaaaaaatcttgaagtagtagaggatttagaaagtcctcaaatgcaacaactataagaataaatggtaaattttacttctttaaatactaaaacttatttttttcttcaaaaaactccaaataaaaatgaaaacccaagccaaacactgagataaggcatttctattctaatatcaacacaaattattatacagacnatatcaataactcttctaaattaataagagaaaatacaaacaacctataaaaatgatcaaaactacaaatagtaattttatagaagaaaaatgaatgcttgataaagatatgaaaagatattctatgtcattaattatcagggactgtttcacacccaccagcttgacacaaatgaaaatgtctgaagctatcaagtgtagctacgaatatcaaatgtacttgcttctcaatgctactgggctctgtgtctggaaggctaacgtatgtggacagattgatgtactaccatgtctttcaatgccttattggtatcagccattaaaagcttc

SEQ ID NO: 3550 - DNA, 661 bp, Homo sapiens
  misc_feature [331]..[331]: Chromosome 8, SNP identification no. = rs11782784
  misc_feature [331]..[331]: allele = g, in linkage disequilibrium with rs1384747, respectively
  misc_feature [331]..[331]: n is a, t, c or g
ttatttatgtggaatagtggaatttaagtggaaagaatgattctgaataagttaaagtggtgagtatggaagtcactatctaactcttttaacatcaaatacaagaaaaaaaatcttgaagtagtagaggatttagaaagtcctcaaatgcaacaactataagaataaatggtaaattttacttctttaaatactaaaacttatttttttcttcaaaaaactccaaataaaaatgaaaacccaagccaaacactgagataaggcatttctattctaatatcaacacaaattattatacagactatatcaataactcttctaaattaataanagaaaatacaaacaacctataaaaatgatcaaaactacaaatagtaattttatagaagaaaaatgaatgcttgataaagatatgaaaagatattctatgtcattaattatcagggactgtttcacacccaccagcttgacacaaatgaaaatgtctgaagctatcaagtgtagctacgaatatcaaatgtacttgcttctcaatgctactgggctctgtgtctggaaggctaacgtatgtggacagattgatgtactaccatgtctttcaatgccttattggtatcagccattaaaagcttctgcagagcaaaataagcaaatcaacaga

SEQ ID NO: 3551 - DNA, 661 bp, Homo sapiens
  misc_feature [331]..[331]: Chromosome 8, SNP identification no. = rs7827381
  misc_feature [331]..[331]: allele = a, in linkage disequilibrium with rs1384747, respectively
  misc_feature [331]..[331]: n is a, t, c or g
atcaatgagactgattgatggcacaatcaatttattgtgccatcacaatggcacatgtagtatttcatggtatagtattccatggtattccatggatagtatttcatgaaatactactcagccataaaaaggaatgaaataatggcattcgcagcaacctgggtggatttggagaccattattctaagtgaaataactcaagaatataaaaccaaacaccatatgtgctcactcataagtgggagctaagctatgaggatgcaaaggcataggaaggatacaatgcactttggggactcaaaggaaagtttgagagacaggtgagggatanaaaaacgacaaatagggtacagtgtaccctgcccagatgatgggtgcaccaaaaatctcaggaatcactcactaaagaacttatccatttaaccaaacaccacctcttcccccaaaacccatggaaataaaaaaagtataaaaatgaataaataaataaaattagaaggcaaatgacaaaaaaagagaatttcaaatgtaaggttggagagcaagaagagtgagctcagagtacttcttccccgagctgcttccttaccaggtcattgcaggtcttggtgtccctctactgtatctcaaagcttaggtacgactcacattaggggaccct

SEQ ID NO: 3552 - DNA, 661 bp, Homo sapiens
  misc_feature [331]..[331]: Chromosome 8, SNP identification no. = rs13254197
  misc_feature [331]..[331]: allele = t, in linkage disequilibrium with rs1384747, respectively
  misc_feature [331]..[331]: n is a, t, c or g
gtcatttgacttctagatttatctctagaaaaaaactataaaaatactctatgtagcaacttttatagcagaaaaaaatggaaaatccaaatgtcaaccaaaatggaatggataaattacttattcttagagtgggatggactaatgttacattcagcaacaaaaatgtggtgttgaacgtacaaaaagtacaggagatagcaaacgataagtccaaaccaatacatttatgaaacatttaaaaataagcaaacttaaaaatacaatatttagttaacttaaaaatgcagtacacctatgagaaaagtatgatttgattaatacagaaagntatttgttttttggagaaagaagaagcttaaggtttgtgataattttctgtttattaaatttggtgttaagtacataggtgtttactttacttttattatttaaactgtacatatctgctatatatagtcatattttgatgatttttgcaacaaatacaagaaagaaatataaagatagaaagcaaacaagtaaagttgtttgtctgggggaaagaccttgtcttatttgttttgtgattccctatgactaatacaatacctgatatataacaggtaatcaattaatatgggctttaaaagagaatgaataaaagaaagaatgaatgaat

SEQ ID NO: 3553 - DNA, 661 bp, Homo sapiens
  misc_feature [331]..[331]: Chromosome 8, SNP identification no. = rs13254288
  misc_feature [331]..[331]: allele = a, in linkage disequilibrium with rs1384747, respectively
  misc_feature [331]..[331]: n is a, t, c or g
aaaatccaaatgtcaaccaaaatggaatggataaattacttattcttagagtgggatggactaatgttacattcagcaacaaaaatgtggtgttgaacgtacaaaaagtacaggagatagcaaacgataagtccaaaccaatacatttatgaaacatttaaaaataagcaaacttaaaaatacaatatttagttaacttaaaaatgcagtacacctatgagaaaagtatgatttgattaatacagaaaggtatttgttttttggagaaagaagaagcttaaggtttgtgataattttctgtttattaaatttggtgttaagtacataggtntttactttacttttattatttaaactgtacatatctgctatatatagtcatattttgatgatttttgcaacaaatacaagaaagaaatataaagatagaaagcaaacaagtaaagttgtttgtctgggggaaagaccttgtcttatttgttttgtgattccctatgactaatacaatacctgatatataacaggtaatcaattaatatgggctttaaaagagaatgaataaaagaaagaatgaatgaatagttaaatgaaatatgtccagggagcagtctctgtctaacaaacactaagaatttagtctttgaagtaaatggctgaaaga

SEQ ID NO: 3554 - DNA, 661 bp, Homo sapiens
  misc_feature [331]..[331]: Chromosome 8, SNP identification no. = rs10504871
  misc_feature [331]..[331]: allele = t, in linkage disequilibrium with rs1384747, respectively
  misc_feature [331]..[331]: n is a, t, c or g
gaagtaaatggctgaaagaaacctgcaatatgaattaagagcacagatttgattactaaaggtctgaccaccaaatagcttaaatattcctcagtctcctatctgaaaaactgtgataaaaattattcctcccttatagtttatgaaaaatgagtgagcaaatacttataaatagcttggaactctatccagaatataataactgatatgtatgtttattacaggtgtaactgtggattcacttatatttttgattctatttcccaacaccaggcataagggtttatcattcttgagattcttaaaagcaacaatatacttacagaacaanttaaacttagtaagatcccaggtagtctgaatgttcaattatgtatctctattttattttcctattattttacacgtaaccatccttactaaagtagtgtctagaaggttgtgcctatgttttctcaaatatgaagcaaataaaacagaatgccattatttgttagtaagaaatggagtgaatgcttttctctaaaaatacccgtgaaaattttaataaatactcagtcattaaatgttaatcagtcaaacatactgccatttactccatttcatgtttctcagtccttgaaaatcacagtccaataatagaaaaaaaaaaaaaaacaga

SEQ ID NO: 3555 - DNA, 661 bp, Homo sapiens
  misc_feature [331]..[331]: Chromosome 8, SNP identification no. = rs10504872
  misc_feature [331]..[331]: allele = a, in linkage disequilibrium with rs1384747, respectively
  misc_feature [331]..[331]: n is a, t, c or g
agcttaaatattcctcagtctcctatctgaaaaactgtgataaaaattattcctcccttatagtttatgaaaaatgagtgagcaaatacttataaatagcttggaactctatccagaatataataactgatatgtatgtttattacaggtgtaactgtggattcacttatatttttgattctatttcccaacaccaggcataagggtttatcattcttgagattcttaaaagcaacaatatacttacagaacaacttaaacttagtaagatcccaggtagtctgaatgttcaattatgtatctctattttattttcctattattttacacntaaccatccttactaaagtagtgtctagaaggttgtgcctatgttttctcaaatatgaagcaaataaaacagaatgccattatttgttagtaagaaatggagtgaatgcttttctctaaaaatacccgtgaaaattttaataaatactcagtcattaaatgttaatcagtcaaacatactgccatttactccatttcatgtttctcagtccttgaaaatcacagtccaataatagaaaaaaaaaaaaaaacagatgctgaaagagctctggcaaggttagagagacaaaagtattttcattccccaaatccaaaatatccattctaagga

SEQ ID NO: 3556 - DNA, 661 bp, Homo sapiens
  misc_feature [331]..[331]: Chromosome 8, SNP identification no. = rs2952472
  misc_feature [331]..[331]: allele = a, in linkage disequilibrium with rs1384747, respectively
  misc_feature [331]..[331]: n is a, t, c or g
atatctctatgatggtgactagtgtcatagacaccattgtatttacgccctacatattcatccttagaatggatattttggatttggggaatgaaaatacttttgtctctctaaccttgccagagctctttcagcatctgtttttttttttttttctattattggactgtgattttcaaggactgagaaacatgaaatggagtaaatggcagtatgtttgactgattaacatttaatgactgagtatttattaaaattttcacgggtatttttagagaaaagcattcactccatttcttactaacaaataatggcattctgttttatttgnttcatatttgagaaaacataggcacaaccttctagacactactttagtaaggatggttacgtgtaaaataataggaaaataaaatagagatacataattgaacattcagactacctgggatcttactaagtttaagttgttctgtaagtatattgttgcttttaagaatctcaagaatgataaacccttatgcctggtgttgggaaatagaatcaaaaatataagtgaatccacagttacacctgtaataaacatacatatcagttattatattctggatagagttccaagctatttataagtatttgctcactcatttttcataaacta

SEQ ID NO: 3557 - DNA, 661 bp, Homo sapiens
  misc_feature [331]..[331]: Chromosome 8, SNP identification no. = rs10107115
  misc_feature [331]..[331]: allele = a, in linkage disequilibrium with rs1384747, respectively
  misc_feature [331]..[331]: n is a, t, c or g
tgagcaaatacttataaatagcttggaactctatccagaatataataactgatatgtatgtttattacaggtgtaactgtggattcacttatatttttgattctatttcccaacaccaggcataagggtttatcattcttgagattcttaaaagcaacaatatacttacagaacaacttaaacttagtaagatcccaggtagtctgaatgttcaattatgtatctctattttattttcctattattttacacgtaaccatccttactaaagtagtgtctagaaggttgtgcctatgttttctcaaatatgaagcaaataaaacagaatgcnattatttgttagtaagaaatggagtgaatgcttttctctaaaaatacccgtgaaaattttaataaatactcagtcattaaatgttaatcagtcaaacatactgccatttactccatttcatgtttctcagtccttgaaaatcacagtccaataatagaaaaaaaaaaaaaaacagatgctgaaagagctctggcaaggttagagagacaaaagtattttcattccccaaatccaaaatatccattctaaggatgaatatgtagggcgtaaatacaatggtgtctatgacactagtcaccatcatagagatataaaaaatttccagatttc

SEQ ID NO: 3558 - DNA, 661 bp, Homo sapiens
  misc_feature [331]..[331]: Chromosome 8, SNP identification no. = rs1240061
  misc_feature [331]..[331]: allele = a, in linkage disequilibrium with rs1384747, respectively
  misc_feature [331]..[331]: n is a, t, c or g
ctttcagctgctgcaaccattgttctgactcctccagggaaatgtcatttttttctaaacataggactactaaagcgcaaagcccattgtaattcacagacacctaattaataatcctcagtacaaaatgactctctccatatagacaatatattgaattactttgaaggtgctgtttctaaatttatgaggaaaacagtgtcctaaattttaagctatacgataggccatgcaaataaaatgtcacagtacagagggagaaagtacatgaaagttgtatcgggacaggattattctcatatgtattcctgccctgaccctgtgtaggaancaggtaatgccagccttcaaacatgcgttagccctgggaaaagggcactgcagagggccatgtgctgctatctctgttccttctcaccaatatattggtgttggatatttgttctctaccactgcctctctggatgccaagattccaacatctgttttagatgtttttgaaaggggatagggtgtccacatagggcggttctggtaagactcatcaaagttttagaggaagtgtgaagatctcttctacttcactgaataatcaataggtagcaatcacaggagtcagacaacaggaaaagccagagctgcagtggctctccagcaagta

SEQ ID NO: 3559 - DNA, 661 bp, Homo sapiens
  misc_feature [331]..[331]: Chromosome 8, SNP identification no. = rs1483368
  misc_feature [331]..[331]: allele = c, in linkage disequilibrium with rs1384747, respectively
  misc_feature [331]..[331]: n is a, t, c or g
atttgatagaaatttacattaaaaataagacttgattgtaagacctcctttcagctgctgcaaccattgttctgactcctccagggaaatgtcatttttttctaaacataggactactaaagcgcaaagcccattgtaattcacagacacctaattaataatcctcagtacaaaatgactctctccatatagacaatatattgaattactttgaaggtgctgtttctaaatttatgaggaaaacagtgtcctaaattttaagctatacgataggccatgcaaataaaatgtcacagtacagagggagaaagtacatgaaagttgtatcggnacaggattattctcatatgtattcctgccctgaccctgtgtaggaaacaggtaatgccagccttcaaacatgcgttagccctgggaaaagggcactgcagagggccatgtgctgctatctctgttccttctcaccaatatattggtgttggatatttgttctctaccactgcctctctggatgccaagattccaacatctgttttagatgtttttgaaaggggatagggtgtccacatagggcggttctggtaagactcatcaaagttttagaggaagtgtgaagatctcttctacttcactgaataatcaataggtagcaatcacagga

SEQ ID NO: 3560 - DNA, 661 bp, Homo sapiens
  misc_feature [331]..[331]: Chromosome 8, SNP identification no. = rs900541
  misc_feature [331]..[331]: allele = c, in linkage disequilibrium with rs1384747, respectively
  misc_feature [331]..[331]: n is a, t, c or g
ttaattttgattgaaaaagtttaattgtatatgcttttgggataaaatatgatacaatgatgtatgtatacaatgtgtactgattaaatcaaacttattaacatacccatcagcttccttacccgtaatttttttatggtgagataaatatgctactttaactggttttcttctgcttcttttactatattttacaatatatctttataatcttctggttatccacatatttccatattaatattttgtttattttatacttttcaaaatgtattgctttataattaatgattttgacttagtttctatgtattaaattttactatgcatnttttttccatttttaacaaattttattcctttgaaaatataaaaacattttattgattatatttcatttcttatttatttattttcatttttaacctctactaccagtgttatttattttatcttattgatagtgtaatggtttccatttgtttatttatacttctttaattttattttaaaaaagcttttggtttattccattttaaattttaatcattatattaattaactttaatatttctattaaaatttttttatgctttcttatcttaatgaccagcaagaggctagtgcaagtaggtggtattgttgagtatttgatagaaat

SEQ ID NO: 3561 - DNA, 661 bp, Homo sapiens
  misc_feature [331]..[331]: Chromosome 8, SNP identification no. = rs1483367
  misc_feature [331]..[331]: allele = g, in linkage disequilibrium with rs1384747, respectively
  misc_feature [331]..[331]: n is a, t, c or g
acttatcctttttcttttctttttaaaagataattcaccatcttgaattacctctatttctgaaaatttgatcacatattagagtaaaaacaaatagactactttgactatataatacaccataaaagtaacaatacattataaaccacaaaattaactaactatttctatgcttttggtgacatccttttttcattttgctttgtttttcaagaaagcatgagaagcacagagtaggtacttgtactggctgttgaatgaactgttgttatatttatgttaagtctataaaaaaagaaagctattaatttattatttttgtctctaaagncactgaccatatcaagccttatattttttcaatatttactttcaaattttatgtttatattttaattttgattgaaaaagtttaattgtatatgcttttgggataaaatatgatacaatgatgtatgtatacaatgtgtactgattaaatcaaacttattaacatacccatcagcttccttacccgtaatttttttatggtgagataaatatgctactttaactggttttcttctgcttcttttactatattttacaatatatctttataatcttctggttatccacatatttccatattaatattttgtttattttatacttttcaaaa

SEQ ID NO: 3562 - DNA, 661 bp, Homo sapiens
  misc_feature [331]..[331]: Chromosome 8, SNP identification no. = rs1240058
  misc_feature [331]..[331]: allele = g, in linkage disequilibrium with rs1384747, respectively
  misc_feature [331]..[331]: n is a, t, c or g
gtgcagtggcgctatctcggctcattgcgacctctgcttcccgggttcaaataattctgtctcagcctcccgcatagctgggaatacaggcacataccaccacacctggctaatttttgtatttttagtagagagggggtttcaccatcttggtcaatctggtctcaaactcctgacctcaggcgatccacccacctcaacctcccaaagtgttggaattacaggagtgattttcttaataatatgatgttggcatataatctaccctaacaacagaaaaggggcaagggtatgcaaaactggatgaaaagaaagttttggaaatatctcnttttctcttacttaagtaattatctctacaaaatacataatggcagtggtcctttgactctaaagctaattccaattaacaatgtttttgatgggccacagcaataatattttgttgtagggtcatttatttctccttcaatgaaaaagctctctaaaagacagctacaaccaggctacaggacacagacagagaaatcaatgttaagaataatggctcgagtccagagaataggatgctgtggtgtatgagtttccttctttatttaatgtttttattaatagaagaaaaattaaattaataactgctccttctcttctcttcttccca

SEQ ID NO: 3563 - DNA, 661 bp, Homo sapiens
  misc_feature [331]..[331]: Chromosome 8, SNP identification no. = rs1531846
  misc_feature [331]..[331]: allele = a, in linkage disequilibrium with rs1384747, respectively
  misc_feature [331]..[331]: n is a, t, c or g
tttcatgaatattgtatatagtacatataatatacaaaatctgtgttaatcaactatttatgttattggtaaggcttccagtaaacagtaagctattagtaattaaatttttggagagtcaaaaattatacatagattttgactgcacaggggagtcagtgtccctaactcctgcattgttaaagggtgaactgtatttgaactagggttctggatccatctggtggacagcatcacagagtataaacccaagttctaaatataaaagcagtgtaagtgcctaagcaagactggaatatgatacttggagttaaaacactatatatgcaanggtatttgccacatttgtttgtgtattctcatatttcacatactcacagattttttccttttttttttttttgctttgaaataatacctcttacttccagatacattcttaattgcattaaataattttataattgacatattaaaagtggacctcaataatctttatctattaagaaagggtaaattaaagcacactattaaagctaatagcacacgattacctattgtttactcgggatgggactgggaggaaggaagactgagtcagcattggttcttccttagccagtttctcttcctctttctgatcattttcttacgtcagtct

SEQ ID NO: 3564 - DNA, 661 bp, Homo sapiens
  misc_feature [331]..[331]: Chromosome 8, SNP identification no. = rs10955896
  misc_feature [331]..[331]: allele = g, in linkage disequilibrium with rs1384747, respectively
  misc_feature [331]..[331]: n is a, t, c or g
ttctaaaattattaaaccatcctttgctggttttacattatccagctttagctctttccacttccttttgcattatgcttttatataatgactgcttctctcaaatcatattagggactgtaagtatgactcttacagcaatcctgcacccacattaaagctgcattttcagtacaacataaaaacatattttataaaccatgaaaggtttttgcacctgctggcatggctgcagtggtggttcacaaatttccctttctcgttttcaatggatcttatgctggattactttatcttgaaatgggcaacaccaaatacagaccatagtctntgacgcacctcaagtgattaaacattttcttgtaatattgtgacttgtctctgtttctcaggagcactttcagcattattagtagcatttcatgtgcatcccactgtgctgctcaaggtttacaggattgtactatataaaaaacgatgagaaatatgtgagaactgcaaaagatcccttttcactgagatacaaaatttactacagagatgaactattcctatagaaatgattagcatgacatggcattttaaacagatactcacaacatgagctcaccataataacaacaggggctggctacaaaattattacagtagtacagtgtta

SEQ ID NO: 3565 - DNA, 661 bp, Homo sapiens
  misc_feature [331]..[331]: Chromosome 8, SNP identification no. = rs6469763
  misc_feature [331]..[331]: allele = c, in linkage disequilibrium with rs1384747, respectively
  misc_feature [331]..[331]: n is a, t, c or g
aatttccctttctcgttttcaatggatcttatgctggattactttatcttgaaatgggcaacaccaaatacagaccatagtctatgacgcacctcaagtgattaaacattttcttgtaatattgtgacttgtctctgtttctcaggagcactttcagcattattagtagcatttcatgtgcatcccactgtgctgctcaaggtttacaggattgtactatataaaaaacgatgagaaatatgtgagaactgcaaaagatcccttttcactgagatacaaaatttactacagagatgaactattcctatagaaatgattagcatgacatggnattttaaacagatactcacaacatgagctcaccataataacaacaggggctggctacaaaattattacagtagtacagtgttactacagttagtcttatgtagttgtgatttactactgtgcttttacatttgcttacatttctctcaactgcaaatgataatgtgcctggtactatgtatagtttttgtgtccataagttttgagaaattttaactttctaatagatttgtatctattttattgtagtaaatgataaatagactagtctccacatatattctatgcattcatgacatatctaattttattttttttctattactaggct

SEQ ID NO: 3566 - DNA, 661 bp, Homo sapiens
  misc_feature [331]..[331]: Chromosome 8, SNP identification no. = rs10106118
  misc_feature [331]..[331]: allele = c, in linkage disequilibrium with rs1384747, respectively
  misc_feature [331]..[331]: n is a, t, c or g
gttatctcctgctcctttccttccttccacctgccaccctcaagtagactccagtgtttgttgttcccttctttgtgttcatgagttctcatcacttagctcccacttataaatgagaatgtggtatttggttttctcttcctgcattagtttgctaaggataatagcctaggataggaaattaaaatgatgccatatcaactagctgctgagtcattttcccgatatagaactactacagatatcttaaacaaataattacaaaatatttcattatttccaactaattataaaatattccaatcttcttatgaagaatttgagttcacanaggcattttataaatcagttgtgttttataattatttgcaggttgctgtttattattattcttacatttattgctttacattgaataacattgtttattttaattatgttaatttttattatatttcattcctgggactttaaagttatgatatatcctcttttatataagttcaacttatatttcagatttgggaggtgcatgtgcaattctgatacatgggtatattgtgtgatgctgagtttggggatgcagatggtcccatcaccatcacccagatagtgaggatagtactcaatagctcttcagccttttccactctgtctcctt

SEQ ID NO: 3567 - DNA, 661 bp, Homo sapiens
  misc_feature [331]..[331]: Chromosome 8, SNP identification no. = rs2338664
  misc_feature [331]..[331]: allele = t, in linkage disequilibrium with rs1384747, respectively
  misc_feature [331]..[331]: n is a, t, c or g
agtgtttgttgttcccttctttgtgttcatgagttctcatcacttagctcccacttataaatgagaatgtggtatttggttttctcttcctgcattagtttgctaaggataatagcctaggataggaaattaaaatgatgccatatcaactagctgctgagtcattttcccgatatagaactactacagatatcttaaacaaataattacaaaatatttcattatttccaactaattataaaatattccaatcttcttatgaagaatttgagttcacacaggcattttataaatcagttgtgttttataattatttgcaggttgctgtttnttattattcttacatttattgctttacattgaataacattgtttattttaattatgttaatttttattatatttcattcctgggactttaaagttatgatatatcctcttttatataagttcaacttatatttcagatttgggaggtgcatgtgcaattctgatacatgggtatattgtgtgatgctgagtttggggatgcagatggtcccatcaccatcacccagatagtgaggatagtactcaatagctcttcagccttttccactctgtctccttctacttctagtagtccctagtgtctattgttgccttttttatgtccatgcat

SEQ ID NO: 3568 - DNA, 661 bp, Homo sapiens
  misc_feature [331]..[331]: Chromosome 8, SNP identification no. = rs13272739
  misc_feature [331]..[331]: allele = a, in linkage disequilibrium with rs1384747, respectively
  misc_feature [331]..[331]: n is a, t, c or g
attcctgggactttaaagttatgatatatcctcttttatataagttcaacttatatttcagatttgggaggtgcatgtgcaattctgatacatgggtatattgtgtgatgctgagtttggggatgcagatggtcccatcaccatcacccagatagtgaggatagtactcaatagctcttcagccttttccactctgtctccttctacttctagtagtccctagtgtctattgttgccttttttatgtccatgcatacccagtgttttgctcccacttataagtgagaacatgtgctatttagttttttgtttctattttaatttccttagnattatggcttccagctgtatctatgttgctgccaagaacatgattttattattttttatggctgtgtagtattctgtggtgtacattttcttccaatcctagagcatgttccaatccatgtttttacatttgtttgtgtcatctatgatttctttcagcagtgttcatagttctccttgcagagacctttcacctccttggttagatgtattcttaggtattttatagctattgtatattcttaatttcgctctcaacttgaacgttattgatgtttagaaatgctactaatttttgtatgttgattttccatctgaaacttcactgaag

SEQ ID NO: 3569 - DNA, 661 bp, Homo sapiens
  misc_feature [331]..[331]: Chromosome 8, SNP identification no. = rs7816905
  misc_feature [331]..[331]: allele = t, in linkage disequilibrium with rs1384747, respectively
  misc_feature [331]..[331]: n is a, t, c or g
tgtggctaagtcttttcatagacatagaagcacttcttttatgaatctaactgctccaatattagatgcataaatgtttaaaatagttaaatcttcttgttgaattgaaacttttatcattatgtaatgcccttctttgtccttttttaccattgttgttttaaagtctgtttcatctaatacaaaaatagtgatccctgctcatttttgtctccccacttgcatgacagatctttctcaagccctttactttgagcttatggtgaatacctgtgtgataagggtctattgaagacagctgatggttgggtcttgtttcttaatccaattngcaactctgtgccttttaagtggggacatttagaccacttacattaaaggataatgttgatatgtgtggttctgaatctatcatgaatttgttagctggttgcattgcagtttctattgtatggttgccttacatggtctgtgggctatgtaattaagtctctttttgtgatagaaggtatcattttttcctctccttacttagaactatcttaaagatctcttgtaagtctggcctggtggtaattctttcccttaatgcttgcttgtctgcaaaagattttatttctcctttgcttatgaagcttagtttggtgggatatcaattttg

SEQ ID NO: 3570 - DNA, 661 bp, Homo sapiens
  misc_feature [331]..[331]: Chromosome 8, SNP identification no. = rs11985034
  misc_feature [331]..[331]: allele = t, in linkage disequilibrium with rs1384747, respectively
  misc_feature [331]..[331]: n is a, t, c or g
acagttatctaaaatatataaaaaaactttaaaaactcttcaataaataagaacaatctaattaaaaatgagcaaaaaaactgcatacacacttcatcaaagaagatacatagatggcaagcatatgcaaaaatgtttaacataatatgtcatcagagaaaaaagtgagaattgcaaactaaaactgtaatgagataacactacacaacttttagaataatcaaaattgaaaacactgacaacatgaaatactagcaaggatgtggagcaacaggaactctcattcactgccagtgagaatgcaaactagtacagccactttggaagacanttccatggtttcatacacaactaaacataccatataatgcagcaattgcacccctcaatatttacccaaataagttgaaaatttacatacacacaaaacctacatactgatatttatagcagctttattgataattgctaaaacttgaaattaactaaaatatccttcagtaagttaataagctatggtacatatagacagtagaattttattcattgttaaaaagaaatgatctatccagcaatgaaaaaacaaaaagaaaataaatgcatattactaagtgaaagaagccaagctgaaaagactatttgctgtatgattcaaactata

SEQ ID NO: 3571 - DNA, 661 bp, Homo sapiens
  misc_feature [331]..[331]: Chromosome 8, SNP identification no. = rs1483363
  misc_feature [331]..[331]: allele = a, in linkage disequilibrium with rs1384747, respectively
  misc_feature [331]..[331]: n is a, t, c or g
ttgatatttttgtttattttgctgtgtcttgttttccttttagacatgttagtcctttttttaaatttatttttgtaaattgacagaactgacagatatatagatatggattttttattttttgtagagaaagggtctcactatgttgaccaggccactctgaaactcctgggcttaaacaatcttcctgccttggcctcccaaagtactgagattataggtgtgagccactgtgatagataaaattgtatttactatgtataatgtgatgtttgttttaaagtatatgtacattgtggaatgactaaatatcactaattaaaaaatgcantatgtcacatagttataattcttgtggttagaatacttttttagaactttttgagaatatattattcactgtaattatatagtcaccatgttgtacaattgatctcttaaacttatatcttctaactaagattttgtgttctttgaccaatatctccctaaccaccattgcttcctactgccccagcctctggtacccaccattctactgtctacttgtatgaggtcaactgttttagaaataagtcatgcacaaaaaagacaaatatgatacagtatttgtctttttgtgactggcttatttcacttaatataatgtcctccagattca

SEQ ID NO: 3572 - DNA, 661 bp, Homo sapiens
  misc_feature [331]..[331]: Chromosome 8, SNP identification no. = rs1483362
  misc_feature [331]..[331]: allele = g, in linkage disequilibrium with rs1384747, respectively
  misc_feature [331]..[331]: n is a, t, c or g
ataagaattgtagagcccaaagttgagagtgctttacaaggtgagagcaggaagggatgctagcctttggtaaatgaggaaaaactttgtattacattttacctcatttattccttcattcaacaaatataaacaggtaccctgacctgagtactatgctatgttttcagaagaatggcatgaacaaaactgatatgatccttatcttcatgcaaattatagccttgtcagagttctgtatactcacttacttgaatacattctcaatattttctttacatgattgagttaaatactacattaaaaattaggaaagatattgctattaganaaggtactctgataataaattctcaatagaaagtaattcttagtatcaattccataaaaaatatagttaagtgtatttttgcttaataagtacagaattctcttaatctttgcttaaacttggaatcctaaagtcaaatatactctacttcaatttttctctatgatgactttatttttgtgcctgtctttaaaaaaaaattaactatactgtcaaaattttcacactttccaagtgtatagaatcaataggttatctaacttttgcaatctggagtctgtagttataaatataattctagcagttcttttttatatttgaactgctcag

SEQ ID NO: 3573 - DNA, 661 bp, Homo sapiens
  misc_feature [331]..[331]: Chromosome 8, SNP identification no. = rs1922306
  misc_feature [331]..[331]: allele = a, in linkage disequilibrium with rs1384747, respectively
  misc_feature [331]..[331]: n is a, t, c or g
ccctgagagaagtaaggaaagaaagaggaagggaaaaaagaggggcaataagaaaggtaggttaagtgaagcatgcacagtatagttctaagggaaatttggcaaggtctttagtagtagaagtaggagtatagttgttgagtcaaagttggccatcacaagagtcctgcgcctccaagatatgggcctgtgttagtccctgccatgctcagctattgtcagggagaagctatgggaaatctggcctcatagtagacttgtattttaaagaccactagctggagccattggccagttactctccttgcagttggcaaactaaaagacatgntttcatagccaaaatactgtcccctgcatctgaaaatttacctcacaagttaagggataaaagtaatctatttccaaggggagtgaagacataggcttggttgagactcactttctctctttcttccttctttccattcttgacagctttgactgggaaccacctctctgacagattctatgctacatgctttgataaagtagggattcaagctaaggataacatagggaaggttgtctaagcaatgatggtacagacagttaataaactaagagttcctgactttgtctactatttgaaagaattcaattgctgcctttaggtgtatga

SEQ ID NO: 3574 - DNA, 661 bp, Homo sapiens
  misc_feature [331]..[331]: Chromosome 8, SNP identification no. = rs16890894
  misc_feature [331]..[331]: allele = a, in linkage disequilibrium with rs1384747, respectively
  misc_feature [331]..[331]: n is a, t, c or g
ttgaaacaaatttaatttttaaacatgaaaggaggacagaaaaatagaaactggagctcactattcttctttacatcatcgacagaataatttccctgaatcacattcccaggccactaaatattgaaatgcttttagaaaactgtcttccaaactcactccttaaacagccttttacctctggatgtttcttttttcttttttaccaggttaatccttcaatagtggtattattgttatcaactttaccatagacaggcagcccaagctatccccttggccaggtttaacaatgatgcaagcatatgcccacctgcttatgccaaaaaangtgtaaaagaaagagaggggagacatgggctttatacttctattcctttcaaagtgaagtcatttgcatgttggatatttttcctattttaatggggtttctctttctctttctcaggcgcattgtaaggcaggcagaaactgcatggctaagagaaaaagcaacaaaagttcctattctggatctttgtgttgctccaaattacttattgtcatttaattataaaataaacacctatgagacttcaaatagctaaaaatagttgagaagatcagtgttacctcaatatttatggtacattttaggtaagttaaaaatgtaaaagaaaaa

SEQ ID NO: 3575 - DNA, 661 bp, Homo sapiens
  misc_feature [331]..[331]: Chromosome 8, SNP identification no. = rs16891021
  misc_feature [331]..[331]: allele = c, in linkage disequilibrium with rs1384747, respectively
  misc_feature [331]..[331]: n is a, t, c or g
atggacacaggaaggggaacatcacactctggggagtgttgtggggtggggggaagggggagggatagcatggagagatatacctaatgctaaatgaggagttaatgggtgcagcacaccagcatggcacatgtatacatacgtaactaacctgcacaatgtgcacatgtaccctaaaacttaaagtataataataataaaaaaataaaaaataaaaaataaaataaaaaaataattaacaaaacaaactttttatgaaaggcagtgcagggtataataggaagaatggagctgtgtaagtgggaagcccaattctgagttctgaatctgnttctgtcacttagactttgctcaaagaaatgatcagatagactttctgagagagtatcctttttttgcctttatcacgggattataatttcaaatttactatgttaacataacattaaatgagtggtttaaatatcatcagaagctatccaggattctttagaacataattttcagaagcttcaatacaaaaataaacagagtaagttaacattattgactaaaatggactaatgaaaaaggaagcagaggagagggaataagagaaatatgtacgttacagaattccttggaatagaaaatagacaatatccaagaaattaaagactaa

SEQ ID NO: 3576 - DNA, 661 bp, Homo sapiens
  misc_feature [331]..[331]: Chromosome 8, SNP identification no. = rs1240073
  misc_feature [331]..[331]: allele = c, in linkage disequilibrium with rs1384747, respectively
  misc_feature [331]..[331]: n is a, t, c or g
atccttctctgccagatgtaagggcctctggaactgttcagttttctaatttgttattaatttctgcttttcttgtatttgaaaatatttctaaaaattgattttacattttaaaatatattaaggttttttttattgcttaattcataattttccttgggaacttataagtatacatacacaactacatatacgcttactaaaataaaggtttatatatacattttatgtactttatatttataaaatgtatgtatatatctatgtatttctgtatgtatatccatatctatattttcatcctgaaacttctaattacgttactcaaggnttctgtattcctcgcatgctttttctttactagctctattatggactgactgaaaagattaagtaatatccttcactcttcgtgatttccatctcaattttattgcatttcctgtaggttttttttttctttaaggaacttgctgctttataatttgttatatagattttcagtttttctgttatttaggtagtcttacatcattttctttatgattttgaataatccatttagtctttaatttcttggatattgtctattttctattccaaggaattctgtaacgtacatatttctcttattccctctcctctgcttcctttttcatta

SEQ ID NO: 3577 - DNA, 661 bp, Homo sapiens
  misc_feature [331]..[331]: Chromosome 8, SNP identification no. = rs13257605
  misc_feature [331]..[331]: allele = c, in linkage disequilibrium with rs1384747, respectively
  misc_feature [331]..[331]: n is a, t, c or g
atgcgaggaatacagaacccttgagtaacgtaattagaagtttcaggatgaaaatatagatatggatatacatacagaaatacatagatatatacatacattttataaatataaagtacataaaatgtatatataaacctttattttagtaagcgtatatgtagttgtgtatgtatacttataagttcccaaggaaaattatgaattaagcaataaaaaaaaccttaatatattttaaaatgtaaaatcaatttttagaaatattttcaaatacaagaaaagcagaaattaataacaaattagaaaactgaacagttccagaggcccttanatctggcagagaaggatgtatttgttttggcatagtctttcaacatcttttgtgtcaataggagaaacacaattcaaatatcaaacttactggaaaaaaatcattatgaaacaattacctaaatggaccaattggatataataaaaacaaggatcagaggaaagttcatagctttaaatatttacattggtaaataagaatatatttacattggtaaataacaaagaattaaaaaattgtaactagcatacaattcaaaataaacctagttatgttaagtgaaacaagctagacccaaaagacaaatacaatatgatctcatttatatat

SEQ ID NO: 3578 - DNA, 661 bp, Homo sapiens
  misc_feature [331]..[331]: Chromosome 8, SNP identification no. = rs1240071
  misc_feature [331]..[331]: allele = c, in linkage disequilibrium with rs1384747, respectively
  misc_feature [331]..[331]: n is a, t, c or g
agttataggagcaatgctgcataggagatctccaggacttatttatcttgcataatcaaaagtttgtacccatcacctccccactgccctctcccctgagcccctggcaatcatgattctactctgcttctattaatttgaatattttagattacatatataaatgagatcatattgtatttgtcttttgggtctagcttgtttcacttaacataactaggtttattttgaattgtatgctagttacaattttttaattctttgttatttaccaatgtaaatatattcttatttaccaatgtaaatatttaaagctatgaactttcctctnatccttgtttttattatatccaattggtccatttaggtaattgtttcataatgatttttttccagtaagtttgatatttgaattgtgtttctcctattgacacaaaagatgttgaaagactatgccaaaacaaatacatccttctctgccagatgtaagggcctctggaactgttcagttttctaatttgttattaatttctgcttttcttgtatttgaaaatatttctaaaaattgattttacattttaaaatatattaaggttttttttattgcttaattcataattttccttgggaacttataagtatacatacacaactacatata

SEQ ID NO: 3579 - DNA, 661 bp, Homo sapiens
  misc_feature [331]..[331]: Chromosome 8, SNP identification no. = rs13276945
  misc_feature [331]..[331]: allele = t, in linkage disequilibrium with rs1384747, respectively
  misc_feature [331]..[331]: n is a, t, c or g
gtatctgctatttcctaattgtcttttgcatatcagtctccaaaactaggggctttacatagtttaattctcattgcaaaactcagtgtaaaactactttagaaaagtagaaatttcagaaaggttaagtcacttgtccaaagtcacactactagtaattccaaaatgaggcttctcagttctaaaggggtgtgtgtgtgtgtgtgtgtgtatgtgtgtgtgtgtgtgttttctttttactccaagggatttcttcacttgaagaagctaatttttgatgtaaccatttttgaaatcatttatgatagtgttctatatgggcatttgtcanatgagattttcagataaatggaatgtttaacaatcacaagtctctttaccacccacatacattaatatggatttggatttatcaattaaatattatcttcaaatgcctatagaaggatctttctctttataatttgaaaagaccaaattgcagttcttactaccctctgaaactaataccagaataaaatttctgatcttcctgtatataaaattgttcttgtagcatctctatgaaaacaaaacaaaacaaaatacaagagttacatataactgtacatgcgaacatataccctatatgtacttgatttctgctaatggaacaacttaa

SEQ ID NO: 3580 - DNA, 661 bp, Homo sapiens
  misc_feature [331]..[331]: Chromosome 8, SNP identification no. = rs13274815
  misc_feature [331]..[331]: allele = a, in linkage disequilibrium with rs1384747, respectively
  misc_feature [331]..[331]: n is a, t, c or g
cctaattgtcttttgcatatcagtctccaaaactaggggctttacatagtttaattctcattgcaaaactcagtgtaaaactactttagaaaagtagaaatttcagaaaggttaagtcacttgtccaaagtcacactactagtaattccaaaatgaggcttctcagttctaaaggggtgtgtgtgtgtgtgtgtgtgtatgtgtgtgtgtgtgtgttttctttttactccaagggatttcttcacttgaagaagctaatttttgatgtaaccatttttgaaatcatttatgatagtgttctatatgggcatttgtcacatgagattttcanataaatggaatgtttaacaatcacaagtctctttaccacccacatacattaatatggatttggatttatcaattaaatattatcttcaaatgcctatagaaggatctttctctttataatttgaaaagaccaaattgcagttcttactaccctctgaaactaataccagaataaaatttctgatcttcctgtatataaaattgttcttgtagcatctctatgaaaacaaaacaaaacaaaatacaagagttacatataactgtacatgcgaacatataccctatatgtacttgatttctgctaatggaacaacttaactatgattactat

SEQ ID NO: 3581 - DNA, 661 bp, Homo sapiens
  misc_feature [331]..[331]: Chromosome 8, SNP identification no. = rs1240069
  misc_feature [331]..[331]: allele = g, in linkage disequilibrium with rs1384747, respectively
  misc_feature [331]..[331]: n is a, t, c or g
gtgtgtgtgtgtgtgtatgtgtgtgtgtgtgtgttttctttttactccaagggatttcttcacttgaagaagctaatttttgatgtaaccatttttgaaatcatttatgatagtgttctatatgggcatttgtcacatgagattttcagataaatggaatgtttaacaatcacaagtctctttaccacccacatacattaatatggatttggatttatcaattaaatattatcttcaaatgcctatagaaggatctttctctttataatttgaaaagaccaaattgcagttcttactaccctctgaaactaataccagaataaaatttctnatcttcctgtatataaaattgttcttgtagcatctctatgaaaacaaaacaaaacaaaatacaagagttacatataactgtacatgcgaacatataccctatatgtacttgatttctgctaatggaacaacttaactatgattactatcactatcgttaatcttagaatacctcaaaagttaaaaagttatcttcatattataaaatatcacagaagagcacgtaaattaaaacataatagaaacatttagaatactgataaaaatattactaagaacttaattttaaaaatgagaacgttgttttgacaaaatgttataacccagagta

SEQ ID NO: 3582 - DNA, 661 bp, Homo sapiens
  misc_feature [331]..[331]: Chromosome 8, SNP identification no. = rs13252970
  misc_feature [331]..[331]: allele = t, in linkage disequilibrium with rs1384747, respectively
  misc_feature [331]..[331]: n is a, t, c or g
gagccactgcgcctggcctttacaatacatttttaaagcttccatttattgtgtattcagtagctatgcaagattggacatattactttactcctctgcgcttcaaatacattgataaaatgagtataaaatgtatatctcttagtactgttgcaagaaatatatcttattatatattgtcatagtccattcaggctacttataaaaataccaaaacttggatagcttataaactacattaatgtatttcctattgttaccgctgttcttgaggctccaagattaaggcatcagcatgtttggtgtctagtgaaaaccagctttctagatnactgatgccaccttctcactacgtcctcacttagtggaaggggcaaggcaactctttgtggcctcgtttataagggcactattcctactcgtgagggctctgttctcatgacctagttacctcccaccaggctcacctcttaatagcatcacactggtgattaggtttcaacttgtgaatctggggagtatataagcattcagaccatggcgtatggcataaaggtaagagattagtgtgacattcatacatattaagtagctaagctgaaatctaagcccagattatctcacttcaaacgccattactgaacccctcatttgattaagt

SEQ ID NO: 3583 - DNA, 661 bp, Homo sapiens
  misc_feature [331]..[331]: Chromosome 8, SNP identification no. = rs1240064
  misc_feature [331]..[331]: allele = c, in linkage disequilibrium with rs1384747, respectively
  misc_feature [331]..[331]: n is a, t, c or g
ttggttgacacacttaatcaaatgaggggttcagtaatggcgtttgaagtgagataatctgggcttagatttcagcttagctacttaatatgtatgaatgtcacactaatctcttacctttatgccatacgccatggtctgaatgcttatatactccccagattcacaagttgaaacctaatcaccagtgtgatgctattaagaggtgagcctggtgggaggtaactaggtcatgagaacagagccctcacgagtaggaatagtgcccttataaacgaggccacaaagagttgccttgccccttccactaagtgaggacgtagtgagaagntggcatcagtgatctagaaagctggttttcactagacaccaaacatgctgatgccttaatcttggagcctcaagaacagcggtaacaataggaaatacattaatgtagtttataagctatccaagttttggtatttttataagtagcctgaatggactatgacaatatataataagatatatttcttgcaacagtactaagagatatacattttatactcattttatcaatgtatttgaagcgcagaggagtaaagtaatatgtccaatcttgcatagctactgaatacacaataaatggaagctttaaaaatgtattgtaaaggccagg

SEQ ID NO: 3584 - DNA, 661 bp, Homo sapiens
  misc_feature [331]..[331]: Chromosome 8, SNP identification no. = rs2222883
  misc_feature [331]..[331]: allele = g, in linkage disequilibrium with rs1384747, respectively
  misc_feature [331]..[331]: n is a, t, c or g
aattctgtcacatttaaccaaacactgtataatttctgtttgagaacaaataggtattctgacagaataacattgaactacatgaaaattgcatagtatatgtgtaaaataattgaaagaataagacattcaagtctaacttaatctttcaacgaagttggtatatttacttcctctcttgaattccttcactcatattattttgtttacatatcttccaacactggttttgctcttaatttttctgtagttattttcttgtcttgttttcttcaagaaatacaaagctttttgagagtcaaaaatatttcacttatttataaattttatntatgcactgaatgaatactcattaagaaattgctacatgcaaggaacaaaaataaatgaacattgtaaagactatcagacctatctgatcatattgatctatgagtgagttaattttcccaaagacagaaggttaactataagataaagtttcttaatctgaagaactaatgagatatatatcataaattgaaacatcttaacaatgtttatgagggactagaactcaattagttttaacagatgaaaacaggttagagaagtaactcatcttcagatttcacctcttcatgaaattggccctgtgaatctattttctcaagtagctcaa

SEQ ID NO: 3585 - DNA, 661 bp, Homo sapiens
  misc_feature [331]..[331]: Chromosome 8, SNP identification no. = rs1681450
  misc_feature [331]..[331]: allele = c, in linkage disequilibrium with rs1384747, respectively
  misc_feature [331]..[331]: n is a, t, c or g
agaaccattgatgagtttaagcagcttttctagacttgtaggaagacttgccaatagttggttgtccttcatagaatcccatgggatgtgagctatgaagctatggctcctcaaatgtttttattccctcagttgtgtgtatgatttatgaggtcatagccacaagcctgaactatcagctctggttgttgggtctaccttgcagaaagtagatgatatgtgtcagcctttcattcgtgtgtgcagagactatttcatctgtctacacagcactctggggcctctttctagacagttgtttttaagtgtcagataacttttctctgggcanggtctcaaaacccaacttatgatgaatatttctagctaacacatctctgccactacttcaggcagtttactgaggtgtatcaataaatcaatgaatcaatcaatctatttatctgtctatctgctttcactactacaaatatattaacggttataattttcatataagactatgtagacttaaaatattttaatatcatttagaaacctgaagtggaatcagaaataggaaaactgtgagtagcggttctgatgagttgaagactgtctgcttaacccttttctatctctgtctaaagtttagttcaatgaatgcagagtccagtgaata

SEQ ID NO: 3586 - DNA, 661 bp, Homo sapiens
  misc_feature [331]..[331]: Chromosome 8, SNP identification no. = rs6469807
  misc_feature [331]..[331]: allele = a, in linkage disequilibrium with rs1384747, respectively
  misc_feature [331]..[331]: n is a, t, c or g
tttctacctccttcttgcattatgttttaatgttaagaaatcttaaatcatttcctattgtatatacataaaactctttaatatagtgaattatacactcattttaaatatcagttgtagaattaatcccaaacctattttacgtggtaataggccacatgtttttaatcattccacctcttttaatcagtgcataggctccctgtataattatgtattgtaatgacacaggagaaatatacagtacttgccatgtattggttgtctaggatacctgtatgagttaattattaataatgtattgtaatggaaaaaagaatctactcatggnaggcagcccacagttatatgtaaatgtacttcaactatataaaatatgaaaataaattctaaagagaaatgtaaataatataaaaaggagaatgtgtggcatgccatccttctacttttttatttgattaaaatatttgtgagtttaattatacttatgtttttacttttgttaaattataacatcatctattacattatgccatttgttgctaaatgaagctggttgtggggatatgcacacaattactttatttgttaaatctattatagtgaaactgaataaaagatattattatcaatctctttaatttcaatatagaatttagtg

SEQ ID NO: 3587 - DNA, 661 bp, Homo sapiens
  misc_feature [331]..[331]: Chromosome 8, SNP identification no. = rs13256692
  misc_feature [331]..[331]: allele = c, in linkage disequilibrium with rs1384747, respectively
  misc_feature [331]..[331]: n is a, t, c or g
gttgtagaattaatcccaaacctattttacgtggtaataggccacatgtttttaatcattccacctcttttaatcagtgcataggctccctgtataattatgtattgtaatgacacaggagaaatatacagtacttgccatgtattggttgtctaggatacctgtatgagttaattattaataatgtattgtaatggaaaaaagaatctactcatggaaggcagcccacagttatatgtaaatgtacttcaactatataaaatatgaaaataaattctaaagagaaatgtaaataatataaaaaggagaatgtgtggcatgccatccttcnacttttttatttgattaaaatatttgtgagtttaattatacttatgtttttacttttgttaaattataacatcatctattacattatgccatttgttgctaaatgaagctggttgtggggatatgcacacaattactttatttgttaaatctattatagtgaaactgaataaaagatattattatcaatctctttaatttcaatatagaatttagtgaaaatcaatattagagaatacataattgctaatccttcttaaaataatagactcattcattaacacagcctcccctcaatggctagctctttaatcattgacattgtctaatt

SEQ ID NO: 3588 - DNA, 661 bp, Homo sapiens
  misc_feature [331]..[331]: Chromosome 8, SNP identification no. = rs6983350
  misc_feature [331]..[331]: allele = t, in linkage disequilibrium with rs1384747, respectively
  misc_feature [331]..[331]: n is a, t, c or g
tatgaaaataaattctaaagagaaatgtaaataatataaaaaggagaatgtgtggcatgccatccttctacttttttatttgattaaaatatttgtgagtttaattatacttatgtttttacttttgttaaattataacatcatctattacattatgccatttgttgctaaatgaagctggttgtggggatatgcacacaattactttatttgttaaatctattatagtgaaactgaataaaagatattattatcaatctctttaatttcaatatagaatttagtgaaaatcaatattagagaatacataattgctaatccttcttaaaanaatagactcattcattaacacagcctcccctcaatggctagctctttaatcattgacattgtctaattatttagcaagaagcaaatcatatccagctctgctgctttggccaactatatgatgggatcctaacatagtcctgtactggattaatttaagtttgcatataaagtgccttagtaatatattgattagaggaaagatggctagctacacaaagagaaaactgaaagcatgctgatgcttgacaaaaattctgataactagcaagctgttgagacaggatcagaatgggaaatgtaccaaaagagtacttattgaaagatgaca

SEQ ID NO: 3589 - DNA, 661 bp, Homo sapiens
  misc_feature [331]..[331]: Chromosome 8, SNP identification no. = rs1483382
  misc_feature [331]..[331]: allele = a, in linkage disequilibrium with rs1384747, respectively
  misc_feature [331]..[331]: n is a, t, c or g
aaatgccacttaagccagagatgacactctgatatcaattgcagattatatctggattttctatatgcctttaaataatttcttgaatctgtggcctccaatttaaatattaaccctgctactgtgggccttttctgtcactgcagctcttctcggtttgcctaaatcagaaatctagcatgcattctggccccattaatactgacagtgtcagtcagaaaatgtgggatttgcaccgacttcttattccagcagagttttatatgattatgacatcattaaaactggagagatccattttgaataattaattggtcttgatgatagaagngtaaaccaaagtaatatgagtaattcttcttctcacattgcagacattatccagaactataatttttaggctgtctttactcactttataatttgtcaagaaatgtgctagtggtttatttttgaattctgtattttgttccgttggtctagtgtctgtctttatgacagtactgtattttttaaattattgtagtcttgtaatatatgtaaaaattaggatgtctctggctttgcttttctttctcaacatcagcgtcactttggctattcagggtccttgtggtttcatatgaattttaggattgttttttcctacttctttaaaaaa

SEQ ID NO: 3590 - DNA, 661 bp, Homo sapiens
  misc_feature [331]..[331]: Chromosome 8, SNP identification no. = rs1240088
  misc_feature [331]..[331]: allele = g, in linkage disequilibrium with rs1384747, respectively
  misc_feature [331]..[331]: n is a, t, c or g
tcagggtccttgtggtttcatatgaattttaggattgttttttcctacttctttaaaaaatgctataatcagtagatcactgtgtaatgtggatatttcaataatattaatttaattaataattaattaatattaatttttccaatttatgaacatagtatgtctttccatttctttgtgtcttatttgattttgttaatcagtattttataatttttctacataagtcttttacctcctttgttaggtttatttctatgcattttattctttttgatgctgctataaatgagattgtttttctaatttccttcagagatatacattcaantcatcttcaataacagtgtcaaggacatctgatgggaaaatgatagtctcttcaacaaatggtgttgggaaaactgaacatccacatggaaaaaaaatgaaacttaatcactaccttacaccataacatataattcaactcaagatggatcagagatttaaatgtaagacctgaagttgtaaaattcgccaaaaagaaaaacataagaaaaatcttcttgacattgctcttggcaaaaatttcctagatttgacatcaaaaacatagaccaaaaaaaaaaaaaaaaagacatgagtagtactgcatcaacataaaaagctttatataaca

SEQ ID NO: 3591 - DNA, 661 bp, Homo sapiens
  misc_feature [331]..[331]: Chromosome 8, SNP identification no. = rs7460547
  misc_feature [331]..[331]: allele = a, in linkage disequilibrium with rs1384747, respectively
  misc_feature [331]..[331]: n is a, t, c or g
aggtaccacaaaaatttaaaaatagagcaattatatgatccagaaatcccacctttgtatacatatccaaacaaactgtaatcaggatctcaaagatatctgcatccaaatattcattgcagcattattcacaggatatgtaaacaatccaaatatccacccaaaaatgaatgaagaaaatgtagtgcatacatacaatagagtatttttcagccttaaataaagaatgaaattctacaatatgtgataatatggatgaacctataggacattatgctaagtgaaataatccagtcacagaaggataaatactgcatgattccacttaccntgacatatctaaaacagtcaaactcaggagcagagagtgaaatggtagctaccaggcacagggagaaaaagaaaaatataaattattgctcaataggtgtaaagtttcagttatgaaagatggatatgttctagcaatctgctctacaacatagtacctatagttaacaatatgatattgtgtactttaaaatatgttaagaagatagattccacattaagtattcctactgtgatgtgaatgcaaaagaaattgcagtttctgcattgctggaattttctgttttatattatatatattttaaataaatgtggttattttatgcatcat

SEQ ID NO: 3592 - DNA, 661 bp, Homo sapiens
  misc_feature [331]..[331]: Chromosome 8, SNP identification no. = rs1240091
  misc_feature [331]..[331]: allele = c, in linkage disequilibrium with rs1384747, respectively
  misc_feature [331]..[331]: n is a, t, c or g
atatgtaaacaatccaaatatccacccaaaaatgaatgaagaaaatgtagtgcatacatacaatagagtatttttcagccttaaataaagaatgaaattctacaatatgtgataatatggatgaacctataggacattatgctaagtgaaataatccagtcacagaaggataaatactgcatgattccacttaccatgacatatctaaaacagtcaaactcaggagcagagagtgaaatggtagctaccaggcacagggagaaaaagaaaaatataaattattgctcaataggtgtaaagtttcagttatgaaagatggatatgttctagnaatctgctctacaacatagtacctatagttaacaatatgatattgtgtactttaaaatatgttaagaagatagattccacattaagtattcctactgtgatgtgaatgcaaaagaaattgcagtttctgcattgctggaattttctgttttatattatatatattttaaataaatgtggttattttatgcatcattttcgtgggtatttctcactttatttttatctttgctgatgacttattacttgctgtttattttatgtttattttagagtatgaaaatgatgttagacaaaaagcaaattcaagcaattttcttattcaagttca

SEQ ID NO: 3593 - DNA, 661 bp, Homo sapiens
  misc_feature [331]..[331]: Chromosome 8, SNP identification no. = rs1483383
  misc_feature [331]..[331]: allele = a, in linkage disequilibrium with rs1384747, respectively
  misc_feature [331]..[331]: n is a, t, c or g
aaaaagaaaataaaatatatgccctattataatggataccatgtcacagaaggacattacctacaaaacaattctgtccaggataattgctttattgtagtgctattaatttatttcaacaattgtggtacctaccatattccaagtgaaatcttataaagattccacatatgtagttaaaattctttagaattcataatacataggtatattgagtgatgctggtattgtaccaaagttatatgaagtgagaaaaatgaaatatagattgattaccatgtataaattttaatttcctcaactatgaagcataagtagctatttttttatnaaattgttttgaagcctaaaggagatgctacctgtgggaattctcatatgattttaaagaactaaataattatattatgccattttatatcatacatttcatatagtaagtgctcagttaatgtttctggaatctatcagtaaaaggaaaaagtttttaaaaagacaaaaatcaaaagtgtagttttaaattcttctggaaaaatctgggtgagaaaatatagatagattattttacttgataatgagtttcctcctgaggaaattatagcacctgcagagaaagaagcttatgctagtgggggaggtagacattatggcaggtaattgc

SEQ ID NO: 3594 - DNA, 661 bp, Homo sapiens
  misc_feature [331]..[331]: Chromosome 8, SNP identification no. = rs16891240
  misc_feature [331]..[331]: allele = a, in linkage disequilibrium with rs1384747, respectively
  misc_feature [331]..[331]: n is a, t, c or g
acatttcatatagtaagtgctcagttaatgtttctggaatctatcagtaaaaggaaaaagtttttaaaaagacaaaaatcaaaagtgtagttttaaattcttctggaaaaatctgggtgagaaaatatagatagattattttacttgataatgagtttcctcctgaggaaattatagcacctgcagagaaagaagcttatgctagtgggggaggtagacattatggcaggtaattgcaggtggcctgacagttcctgctgatctgacatcttctcaacagctagatttacataatgaaaagacaagaaccagtgttgcttctaatatgatngtgacttttgcaattctattccaattcaattgtggcagaagacatatttaattataatagtgctgagatgactagcgccagtaacagtagatttatgacaaactacctcattacttattagtagggaagacaacaaaaatgttactttctcacacgtttggattatacacttaatgaagaactatgcatatatcttagtgttaaaaatataacagaaataatacctctgtaaattgagtgaaatcctcaatgtacaatgaaaatctcaggtaaccaattttagaattgaaatatgaagttaaaggtacaaaagaccatttacaatttttt

SEQ ID NO: 3595 - DNA, 661 bp, Homo sapiens
  misc_feature [331]..[331]: Chromosome 8, SNP identification no. = rs13259001
  misc_feature [331]..[331]: allele = c, in linkage disequilibrium with rs1384747, respectively
  misc_feature [331]..[331]: n is a, t, c or g
tgcaggtggcctgacagttcctgctgatctgacatcttctcaacagctagatttacataatgaaaagacaagaaccagtgttgcttctaatatgatagtgacttttgcaattctattccaattcaattgtggcagaagacatatttaattataatagtgctgagatgactagcgccagtaacagtagatttatgacaaactacctcattacttattagtagggaagacaacaaaaatgttactttctcacacgtttggattatacacttaatgaagaactatgcatatatcttagtgttaaaaatataacagaaataatacctctgtaaantgagtgaaatcctcaatgtacaatgaaaatctcaggtaaccaattttagaattgaaatatgaagttaaaggtacaaaagaccatttacaattttttgatgcatactttaccagaaagagatatttgtgagttctccattttacaagtctctatggagatataacattggcctacatacttcagcatcattatttaagtcctgagtccaaaaccttcccacatatgggtctgccttttaatttaaaaagccataaagcatccaaatggtgtcctttttgttctctgtgtggcagtagatcactgcttctatgttaatcttctcataatcct

SEQ ID NO: 3596 - DNA, 661 bp, Homo sapiens
  misc_feature [331]..[331]: Chromosome 8, SNP identification no. = rs17758172
  misc_feature [331]..[331]: allele = c, in linkage disequilibrium with rs1384747, respectively
  misc_feature [331]..[331]: n is a, t, c or g
atagtgacttttgcaattctattccaattcaattgtggcagaagacatatttaattataatagtgctgagatgactagcgccagtaacagtagatttatgacaaactacctcattacttattagtagggaagacaacaaaaatgttactttctcacacgtttggattatacacttaatgaagaactatgcatatatcttagtgttaaaaatataacagaaataatacctctgtaaattgagtgaaatcctcaatgtacaatgaaaatctcaggtaaccaattttagaattgaaatatgaagttaaaggtacaaaagaccatttacaatttnttgatgcatactttaccagaaagagatatttgtgagttctccattttacaagtctctatggagatataacattggcctacatacttcagcatcattatttaagtcctgagtccaaaaccttcccacatatgggtctgccttttaatttaaaaagccataaagcatccaaatggtgtcctttttgttctctgtgtggcagtagatcactgcttctatgttaatcttctcataatcctttggctcttctcttaccttctacatataattcctgtcctgctgatctgaatcttgttcttgcccacattctccagatcctcatttccaccactc

SEQ ID NO: 3597 - DNA, 661 bp, Homo sapiens
  misc_feature [331]..[331]: Chromosome 8, SNP identification no. = rs2170706
  misc_feature [331]..[331]: allele = c, in linkage disequilibrium with rs1384747, respectively
  misc_feature [331]..[331]: n is a, t, c or g
ctgtaaatagccagaggaaaaaaaacctggtcagcttatttgatctcctatatgatgtgtagatttctctgtaaagaaaaaaatcctttactctataaaccactcacccagcacatttaatcccttctagtgagaaagcactctatttcccaaggcaaatccatttcctcctcgattcttgatatattgcttatttaagtttagcataaacaactagctctatctcacaggcttgctttaacacatcggttctcaaccctgacagtatattcaatgttgttagaatcagtatggacactttataaaaataccaatgcctgagccccattgncagaaattctgtttcaatttttcgagggcacaatggtcatttttcaaacctctctaagtgttttgaataaacagccatagttttcagatccccctgctttaagctttgctgcctatataaccccaaaccacacagtgacatcacaaagccaaagcacagtcctatattattccctatgttgtcctagctctttgaagtctggagaagtactttttggaacataatttattcattaaaacaatttttgagtactttccatatgtcatgtgttgagctatgtacttgatatggtataaatatttgtgtaccccaaaaatttatatgttgaaa

SEQ ID NO: 3598 - DNA, 661 bp, Homo sapiens
  misc_feature [331]..[331]: Chromosome 8, SNP identification no. = rs7839675
  misc_feature [331]..[331]: allele = t, in linkage disequilibrium with rs1384747, respectively
  misc_feature [331]..[331]: n is a, t, c or g
gagccactgcagacagcaagtgcaagtatctcacacagacagccagcttgactatatgagatttcaaaaaggcaaacagctgaccaatttagggcaccactccataaaaaaacaaacaaacaggagctccctgcatctaatcaagctttgcaagattgagagaagcacaaaatttaatccctcatttcaagataaaacaagatgtatagagtgagaacatccacagataaagtctaagagagccccagaatccctagatgggctgtttggtgaaggtgtttctcttctgaagccattcattagacacaagaggaggtgactgctcttcaangtgaagatagcaatgtaaaatttcaaggaacatgaaaaaataaaggaaatataaaatcacaaagaaaacaataatatttcagtaactgactctaaataaatgaaaattgatagattgtctgacaaacaattcaaaataattgtattagggaatcttggcaagctacaagagaacacagaaaaacaactcagtgagatctgaaaaaaaatgcacgaagcaaaggagaagttcaataaaaagacagaaattataaaacagaaccaaacaaattctagagctaaagaatacaacaaatgaaataaaaaatacaatagagaggatcaacagcag

SEQ ID NO: 3599 - DNA, 661 bp, Homo sapiens
  misc_feature [331]..[331]: Chromosome 8, SNP identification no. = rs7842356
  misc_feature [331]..[331]: allele = c, in linkage disequilibrium with rs1384747, respectively
  misc_feature [331]..[331]: n is a, t, c or g
acagataaagtctaagagagccccagaatccctagatgggctgtttggtgaaggtgtttctcttctgaagccattcattagacacaagaggaggtgactgctcttcaacgtgaagatagcaatgtaaaatttcaaggaacatgaaaaaataaaggaaatataaaatcacaaagaaaacaataatatttcagtaactgactctaaataaatgaaaattgatagattgtctgacaaacaattcaaaataattgtattagggaatcttggcaagctacaagagaacacagaaaaacaactcagtgagatctgaaaaaaaatgcacgaagcaaangagaagttcaataaaaagacagaaattataaaacagaaccaaacaaattctagagctaaagaatacaacaaatgaaataaaaaatacaatagagaggatcaacagcagactcgatcattcagaagaaactctgtgtactcaaatatgagtcattgtaaaatagtcagtcagaagattaaaaaaaaaaagaagtgagaaggaatgaaggaagcctacagggtttattggataccatcaagggagctaacattcacattaagtgactctaagaaggaaaacatatggaaaaatagggcagaaaacatatttaaagaaacaatcactaaaaac

SEQ ID NO: 3600 - DNA, 661 bp, Homo sapiens
  misc_feature [331]..[331]: Chromosome 8, SNP identification no. = rs2338668
  misc_feature [331]..[331]: allele = g, in linkage disequilibrium with rs1384747, respectively
  misc_feature [331]..[331]: n is a, t, c or g
aaaacaatcccatttacaatcgcatcaaaaataataaattacttaagaataaatttaacaaaggaagtaaaagatctgtatgctgaaaactatgaaacattgatgagagaaactgaagaaaatacaaataaatgaaaagatatcccaagttcatggattagaagaatgaatattgccaaaatatccaaactacccagtgtgatctatagattccatgcaacccctacaaagagtcccatggcatttttcacgtaaatagaaaaagaaatcctaaaatatgtatgaaaccacaaaagtccccaaagcaatcttgagtaacaacaaaactganggcataatatttcctgatttcaaattgtataaaaaagtatatttattaaaacagcatggtacacagaccaatggaacagaataggagacgtagaaataaatctatgcatttattgtcaatttcttttcaacataggcatcaaaaatgtacaatggagaaaggattgtctcataaataaatggtgttgagaaaactagatatctacatgttaaaaaaatgaaatttgatccctatcttacactgtatacaaataaccaactcaaagtgcaataaaaacttaagatccaaaactgtaaaactcttagaataaaacatgggaaacgttccatg

SEQ ID NO: 3601 - DNA, 661 bp, Homo sapiens
  misc_feature [331]..[331]: Chromosome 8, SNP identification no. = rs2338669
  misc_feature [331]..[331]: allele = g, in linkage disequilibrium with rs1384747, respectively
  misc_feature [331]..[331]: n is a, t, c or g
aaaataataaattacttaagaataaatttaacaaaggaagtaaaagatctgtatgctgaaaactatgaaacattgatgagagaaactgaagaaaatacaaataaatgaaaagatatcccaagttcatggattagaagaatgaatattgccaaaatatccaaactacccagtgtgatctatagattccatgcaacccctacaaagagtcccatggcatttttcacgtaaatagaaaaagaaatcctaaaatatgtatgaaaccacaaaagtccccaaagcaatcttgagtaacaacaaaactgagggcataatatttcctgatttcaaattntataaaaaagtatatttattaaaacagcatggtacacagaccaatggaacagaataggagacgtagaaataaatctatgcatttattgtcaatttcttttcaacataggcatcaaaaatgtacaatggagaaaggattgtctcataaataaatggtgttgagaaaactagatatctacatgttaaaaaaatgaaatttgatccctatcttacactgtatacaaataaccaactcaaagtgcaataaaaacttaagatccaaaactgtaaaactcttagaataaaacatgggaaacgttccatgacattggtctcagttgttatgattttt

SEQ ID NO: 3602 - DNA, 661 bp, Homo sapiens
  misc_feature [331]..[331]: Chromosome 8, SNP identification no. = rs1601090
  misc_feature [331]..[331]: allele = c, in linkage disequilibrium with rs1384747, respectively
  misc_feature [331]..[331]: n is a, t, c or g
ccaaagatgatatacaaatggcaaacaggttattgaaaaggtgctcaacaacactaatttggggaaatgcaaattaaagccacaatgagtcttagatacacctcagccacaatgatccttagaatcaccatagaatcatcctaaaatcacaatttttaggatggtttctgtcaaacatttaaaaggtgttgtagacaacgtggagaaaagacaacacttgtatactgttgatggtaatgtaaattggtatagcattatgaaaaatagcatggagtttcctcaaaacattgaatagagaaccaccttactattgagcaatctcacttcttantatatatccaaaggaaataaaatcattatcacaaagacatatctacattcccatgttcattacagccttattcacagtagccaagatatagaaacaacttaagtgtctgtcactggataaatgaataaaggaaatgtggtttatatatttgtatatggaatataatataataaatacagcataatataattgaatgttattcatccttagaaaagaagcaaatcctgccatttataacaacatggataaacctggagaacattacactaaatgaaataagccagatacagaaagacaaatactgcatgaactcactcatatgtggaatct

SEQ ID NO: 3603 - DNA, 661 bp, Homo sapiens
  misc_feature [331]..[331]: Chromosome 8, SNP identification no. = rs7001521
  misc_feature [331]..[331]: allele = t, in linkage disequilibrium with rs1384747, respectively
  misc_feature [331]..[331]: n is a, t, c or g
ttattccaattttgcagatgagaaaactcagatgtttaaaaaatcaactcagcttcttctgggttcttctttgagaagtagagaaattggcatttgaatttaggtaaaatgactccaaagtccatattacattcactgtcccatagtcttctatattctacaattatactctgaacacaaattttaaattgtatgatatatgtgaagttaagtaaatttttcttgtcagaaattgttgcttgtaaatttgtcttcgtacaccatttgacaacatatcaataaagcagtcctacattttaagaacattcagtataagacaatcaggtattanggaacaagtatattaaatggctatttctcttttgaaatttatatgctatttgatggagtatataaatgggcatcccaaaataattcaaattagaaaagctgagtcatcgtggactctaagtatacatattttaccgccaatatcttatgaattactatgaggcatttaaatctatattcaattttgctcaagctatatttatgtgaaactcagggttaatattaagtcacattattatcaaaaattcaaaaggtaacaagtgttggagaggatatggggaaaattaattttaatttaatttaatttaaatctaatttaattttatttaaa

SEQ ID NO: 3604 - DNA, 661 bp, Homo sapiens
  misc_feature [331]..[331]: Chromosome 8, SNP identification no. = rs7001519
  misc_feature [331]..[331]: allele = a, in linkage disequilibrium with rs1384747, respectively
  misc_feature [331]..[331]: n is a, t, c or g
atatatgtgaagttaagtaaatttttcttgtcagaaattgttgcttgtaaatttgtcttcgtacaccatttgacaacatatcaataaagcagtcctacattttaagaacattcagtataagacaatcaggtattatggaacaagtatattaaatggctatttctcttttgaaatttatatgctatttgatggagtatataaatgggcatcccaaaataattcaaattagaaaagctgagtcatcgtggactctaagtatacatattttaccgccaatatcttatgaattactatgaggcatttaaatctatattcaattttgctcaagctntatttatgtgaaactcagggttaatattaagtcacattattatcaaaaattcaaaaggtaacaagtgttggagaggatatggggaaaattaattttaatttaatttaatttaaatctaatttaattttatttaaatctttaatttaattaaaatttaatttttaaaaaatctttaatataattaattacaatttaatttaattaaaattttaattgaatgttagccaggtttaatattaaggacagaaaagtcattgggctgaaatagctttagcacattgaaaataattatcacacctaggcacatatacctatttaaaaaagaaattg

SEQ ID NO: 3605 - DNA, 661 bp, Homo sapiens
  misc_feature [331]..[331]: Chromosome 8, SNP identification no. = rs7462065
  misc_feature [331]..[331]: allele = g, in linkage disequilibrium with rs1384747, respectively
  misc_feature [331]..[331]: n is a, t, c or g
atattaatatatatatgaaatttgtatatatatatgaaatgtataaaatatcacagatagctaaatgctgagacttctgtgataacccaaacccagtacatgatcatcaaacagcttatattttatagcctaacactgcctaaatagctatggcagaaaatggcaggtaagtattgattcttcttttttctgagcatacactttttatgacatttctcagtctatctggagttaggtggagctatgtgattgagttctggcaaatacaatttgggcagaagtgctagttgccagatctggcctctaaaccttcttgtgagatccttcgtgntcttcctgtcttccgctctccttaaagccaaataaattgtatagccacagcatgaagaaacctggatgcctgaagcacagctttcctgctgaactgtgataacagtacctatgtgagaatagaccttgattgttctgagtcatggggacctggaatatgctgcagttagcctaccctaatgcaaatgtcaaagtaatcagcttcagttataaatgatctagatctgctagctacatctaatattaaatactaacatcaagctatgaatattctacataagcagcatttaccttatttccatttgcctcaaagtatgtgtagtgaaaacaa

SEQ ID NO: 3606 - DNA, 661 bp, Homo sapiens
  misc_feature [331]..[331]: Chromosome 8, SNP identification no. = rs9650077
  misc_feature [331]..[331]: allele = g, in linkage disequilibrium with rs1384747, respectively
  misc_feature [331]..[331]: n is a, t, c or g
ttctattctgattattgaagctaagagtgctgctgtgtgtcttgtggctgatcccaaattagaatatgaaagctgaaatttaaaaaaaaatgtgaactagcttagcatttttttccaaagctacatcaatagaagatgcccttttgtagcagttgaaaatgagtatttatttttgcaaggaatttcaggtgagaaaaaaatatttttttcttccctaagaagtaacaaatatgattcctctttggcaagaattttagagagaacatttttttagtttaattgtcctggtctgcatattggttacacagagcacaaaataatagcagctgtngaatcatctgttccttcacggattgtatgtaagattcttttctcctatattagtgcatgtagagggttgtggggtatggagtctgagtcataccaaggggggaaaataaaaattgctatgaggaaaaaaggaagaatatacataagatggctttcataagttccattttgccccattcaggcaaccacaagtaactgacaaaagagaaaaaggagattttcaatgcccaggctttgtcatattatacacaggagcaacactatttttctctttgccttccagtttttccatggggaacaatcagttttctgcaagattactttgacatta

SEQ ID NO: 3607 - DNA, 661 bp, Homo sapiens
  misc_feature [331]..[331]: Chromosome 8, SNP identification no. = rs7826720
  misc_feature [331]..[331]: allele = c, in linkage disequilibrium with rs1384747, respectively
  misc_feature [331]..[331]: n is a, t, c or g
ttagttcttaatatatatgatacgaatagaggaataaatatgtgtcaaggttttatctacaagtagcaatgacagtctctttctatttcccaaattctttttctattataattttaccatgaggggcattgaccctctaccctaagtccacatgaaagcaaaaaataaaaggttaaggaaaaagtcagtttgttcactagaggaagcttcttttatgggagacatacttccagtgcctattacccgacaatcttgtattccacctacaagaccctagataaggcagggcccagaagaatggaagaaaagataactcatttattaattcaantatagttttttgcatctactatatacctggaacttttttaaaacctaaaggataaagccataaagaaagcaaataaaaatcactgccctcttaagtttgtactgaaatgcagggaggaaatttcaacaggccattgcagaatgtggaagcacaaggaaaaatccaagtgggaagaaaaacctcttaattcaaagaaacagaaaccagagtggtagggactctgaggatggtgtggactccatgatgaattcacctgtagaccacctgctctggaacagtcctgagtatttgcaagcctgctgaaccaaagacagggaattgaaactctct

SEQ ID NO: 3608 - DNA, 661 bp, Homo sapiens
  misc_feature [331]..[331]: Chromosome 8, SNP identification no. = rs10504874
  misc_feature [331]..[331]: allele = a, in linkage disequilibrium with rs1384747, respectively
  misc_feature [331]..[331]: n is a, t, c or g
atggttcatggctaaaaatactacttatattgtcttattctgtatcttcatttggtgtgaaacatgtacttaaaaaacattatgaataagtaaatgagtgaataaacagagaaagtaaaatagggaaaaaagatgaaaatgaaaaaaaaaaccaaaagaataaaattataagtatctagatggctgacaaagaatgacacttcccatttataaacaatgtatctttttgtcattgaataatacactgaagaattggcctccttgcactttggtcaatagagactttgattgattatgtctgttggaatgtgtaaagaagacaagaactccnagattcctaaaagcagagtagccaatactatcttatgcttaccaatttttaaacatgatatgtgaatatggatatggattacaagaaaacagggaaaattataatttttgtgattaaaagtggcagtcagtgtaatacttattttttctatgtaatataaaatagggttataagacaaaatgtaataaacttccaaatcttctgacaggtatgagtgatttcagtgttaaatgttcacagataataccaaaggttaaaaagtgatcattgaattttttttaaaaaaaatctcagtttgtaaaacatttatttaaaaaatacctccttctt

SEQ ID NO: 3609 - DNA, 661 bp, Homo sapiens
  misc_feature [331]..[331]: Chromosome 8, SNP identification no. = rs13280094
  misc_feature [331]..[331]: allele = a, in linkage disequilibrium with rs1384747, respectively
  misc_feature [331]..[331]: n is a, t, c or g
ttataagacaaaatgtaataaacttccaaatcttctgacaggtatgagtgatttcagtgttaaatgttcacagataataccaaaggttaaaaagtgatcattgaattttttttaaaaaaaatctcagtttgtaaaacatttatttaaaaaatacctccttcttcactgtaccagcagagttttgaattgacttttcttttctgacattcttatatttagcacccatatggtgattgcatgtttgactgcttcatccgtcaatttgaagtcaagggtactgaagtaagaaatcatgtgtaatgctcactgtgtactcccaggcaccaaaatngtactacatttatagtattattcatggtatatattacatatatattcatggttgttctgtggacatattagaaacactatgggtcaaagtaatttggtgcatttttttccaaagcaatctcttaaaattattaacattcaacatgaccaaaatgattcctagagttccaaggcagttgagatgggtattagtaaaaacataaagaatgcacatgaacagcagggtcagggtgagcttcagtggcttttctattgatgacatctggatccttaactgcttaaattgataagggtaacaagaataataaaccactacaagtgctaatgattc

SEQ ID NO: 3610 - DNA, 661 bp, Homo sapiens
  misc_feature [331]..[331]: Chromosome 8, SNP identification no. = rs1384747
  misc_feature [331]..[331]: allele = a, g
  misc_feature [331]..[331]: n is a, t, c or g
aaacactatgggtcaaagtaatttggtgcatttttttccaaagcaatctcttaaaattattaacattcaacatgaccaaaatgattcctagagttccaaggcagttgagatgggtattagtaaaaacataaagaatgcacatgaacagcagggtcagggtgagcttcagtggcttttctattgatgacatctggatccttaactgcttaaattgataagggtaacaagaataataaaccactacaagtgctaatgattctactcagataagtttgggacactgattattctgatccatttcacagataatagactaaaatagaaatttcanagcagaacttatttaagtcaaaggagatgtaatattactactatcagtgaatgagagaggtattgagcatctactctgagctcagcatgtctctagatgataagaaatataacattatttggcatgatgcctgcttcaaaaaatagtttggaggctgagaaaaaagatattaataatagaaagagtaattagcatttactgaatacctaaatgggaattctgcattcatatgtcttttaatccctgaagggaccctaccaggtaaatattaatattattctcttttgaaagatagataaaaaagagtttcatagaatttaaatgcttccc

SEQ ID NO: 3611 - DNA, 661 bp, Homo sapiens
  misc_feature [331]..[331]: Chromosome 8, SNP identification no. = rs13264194
  misc_feature [331]..[331]: allele = c, in linkage disequilibrium with rs1384747, respectively
  misc_feature [331]..[331]: n is a, t, c or g
cacttgcaccatgagaggcatagatctttgtacaactctatttttaatgtgttggtgtccatatgtacagatacagacagaaaaaaaagagtagatatgataatggagtaaaggaagagaatgactgggtcaggaaacatgctacgaaaaagattcccagagggaagccaggtgaaggagaagaaccttagtgaaaggttcttaaagatatttcatgcctcagcaaggaactgaatagaaacattattgaaaaatacaatgtcctcaactgaacaattttcttgaattctaactggctattgtatctatgagtaatatatactgatatganacaaaaaatgcatttacactactgtcagcccagtcatttcttagaatacttagttttattctaataagaccactgaatttacttgctaagagtttaatcagaacattagcccatatattttaatagaaaaacaataataaaattaataaatatacacttatattgatcaagaaaaatagaaaatactaatatcaataatcaaagcagtacaaaccctacagatagtaaccattttgtttaggcatattaagaaaaaattacaacagtaaattcaacaacttagatgaagttgaaaaaattattgacaaaaaaaaaaaccaaaacctggtg

SEQ ID NO: 3612 - DNA, 661 bp, Homo sapiens
  misc_feature [331]..[331]: Chromosome 8, SNP identification no. = rs13272639
  misc_feature [331]..[331]: allele = t, in linkage disequilibrium with rs1384747, respectively
  misc_feature [331]..[331]: n is a, t, c or g
ctgatatgaaaaaaatacagctaatagtatatttactgatttaacactatgaataaaagacagtgtctactccttacactaccttatgctactgctcaacattatatcattttaataaagaatgaaaagctaataaaagcataaagactgtaggaaaatggaaaatgtttttatctgtagatgacatcatatttatatagaaacaataaaaataacaaaatattataactaataagtgaatttagcttagtgagaacgtggacttgcatccccagtagtaatgaggagcttctttaccttcctgctgaaatagtgtcaacagaggcctagnagagagtcaggactttaagctcagcaataaagaaaccagacccctgtgtgccactggaaaaccagtggggagcaataatgaggcactaaaaccaattcaggcagagaggtatgactggcgatctagttgagaaccccgatttctatacctacccaacaataataaggagcacacacccttgggtgttaacaggtcaaattgagaatctggacatcaaaccccaggaaataaattgcaatacccttcccctgcttgggtggtgccagtgaaacagaagttttaaattactttcagagtctcataatgtaagatccaaaatatccaggtttc

SEQ ID NO: 3613 - DNA, 661 bp, Homo sapiens
  misc_feature [331]..[331]: Chromosome 8, SNP identification no. = rs2220084
  misc_feature [331]..[331]: allele = c, in linkage disequilibrium with rs1384747, respectively
  misc_feature [331]..[331]: n is a, t, c or g
gttggcttcatttttattatctcatttttttaatcaataatgatctttgtttttaatgaagtccaatgtttcattcttttcctttgtgattattgcttttttgtgctgtgtaaaacaactattgtcttccctaagaacataaaaaaattttagtatcctgagacttcactgaagttgcttatccacttaaggagattttgggctgagttgatggggttttctaaatatacaatcatgtaatctgcaaacagattacaagcattcctatataccagtaacagacaaacagccaaacgatgagtgaattcccattcacaattgctactaaaantataaaatacctaggaatacaacttacaagagatgtgaaggacctcttcaaggagaactataaaccactcctcaaggaaataagagaggacacaaacaaatggaaaaactttccatgctcgtggataggaagaatcaatatcatgaaaatggccatactgcccaaagtaatttatagactcagtgctatccctatcaagctaccacagacttttttcaaagaattggaaaaaaaactactttaaacttcatatggaaccaaaaaagagtccgcatagccaagacaatcctaagcaaaaagaacaaagctggaggcatcacactacctggc

SEQ ID NO: 3614 - DNA, 661 bp, Homo sapiens
  misc_feature [331]..[331]: Chromosome 8, SNP identification no. = rs7001583
  misc_feature [331]..[331]: allele = a, in linkage disequilibrium with rs1384747, respectively
  misc_feature [331]..[331]: n is a, t, c or g
cgagttatagtaggattttctacatgagtaatgatgttgctgcaaatagttttatttctttcttttcaatctgtacgccattttcttctttttgccttcttatactagctaaatttccagtatgatattgaattaaagtggtgataatggatacctttacttgttgtctatgttaggaagaacgtatttagactttcaaccattaagtctgatgttaaatacagttttcataacgccctttcttcaggttgattatatctcctatttctagtttctggagagtttgtattcttaaccgatgttaacttttttcaaatgcttctcctgtatnttgagatgatcatgtgtttgactttttttgtttgtttgttgatttgtggaagtagattgatttgtaaatgttgaaccactttatattccagtcatgcaatcaacagggtcatgatatattgccatttttacatactatcaagatcaatttcattatgctgtgttaaggctgtttgtgtctactttatgagggatattggcttgcagttttcttgcaatgttttggtctagttttggtttacagaatctgcaaaaaaaaaacctataactggtgggtttagcactggtttatcataaaatataaagttggataagcagattggccaaactg

SEQ ID NO: 3615 - DNA, 661 bp, Homo sapiens
  misc_feature [331]..[331]: Chromosome 8, SNP identification no. = rs12675133
  misc_feature [331]..[331]: allele = c, in linkage disequilibrium with rs1384747, respectively
  misc_feature [331]..[331]: n is a, t, c or g
aaaacatctcagtctctcaagacaattaaactagggatgatactgcaattttgatattaaaccacagttgtcagcattgtatcagcttgacctggctgtgtgtacacgcctcttaggagagcatttttgtacatgtttttctgtagctattcttcatatcaaagtgagatcaaatggagagtttggatgcataccacacagtggtttgtgaagtccatttggcctacattctaacaacccaagcacttcagggaaaattccaagtcagcttatgatcaccacctgccaggaatctagcccagctgtgacagagctgcagagtctggctgtnagccacgaaaatacagaaaaagggtaaaaaaggattttcagacttgttttattgcccttcaggacaatatagatggaaagaatataaagaaaatttgaagattagggaaaaatgagagttcaggaatatatatatatatatatatataactaattttgataactttctatttaagaatggtatgaatcccagcactttggtaggccaaggcgggtgaatcacctgaggtcaggagttcaagaccagcctggccaacatgataaaaccctgtctctactaaaaatacaaaaaattagccaggagtggtggcaggtgcctgtaatcccagct

SEQ ID NO: 3616 - DNA, 661 bp, Homo sapiens
  misc_feature [331]..[331]: Chromosome 8, SNP identification no. = rs13269854
  misc_feature [331]..[331]: allele = c, in linkage disequilibrium with rs1384747, respectively
  misc_feature [331]..[331]: n is a, t, c or g
aaccctaggtaagatggtacattaaatattctaagtaattcagatcatatcttctttcctatgggctacacatgtatttcatagcacattttgctttttttcagtgtactataaatttctcatttcacatcacagatttcttgaggactgaaataatgtttggtccacatcagtatcctcgcacatcctacctacctgccaagcacaattcttgatcttttgtaatatgctctccaaattatttattgcattgtattgttcaattctgctgtactacagtccatctacaatgccactagcaacatttacaaactagtatggtcaaaatcanctatgaggtttagagaaaaatgctaagtattggttggctaaacatattaactaagtccactgtatataagacatagtctttgattcctaattttagatttatacatcatatcattacaattagtagatggtttcttaaaagtctcctgatacgtactttctgttaagcctgaaaaatgttgagacttaaataaatagcactcaaaaaaaattcacattacttcaactctcagaataattttctcaatttctcttctgtattcaatgacctcactatccaagagctgaagctggaatttcactatcttttaaaaatagtcccagtttatag

SEQ ID NO: 3617 - DNA, 661 bp, Homo sapiens
  misc_feature [331]..[331]: Chromosome 8, SNP identification no. = rs4960963
  misc_feature [331]..[331]: allele = c, in linkage disequilibrium with rs1384747, respectively
  misc_feature [331]..[331]: n is a, t, c or g
gaaggttttctaaagacctaattggttttaattgtgattctagaatcaagcaacaccccattcttttttctagtctaataaatttttatttttaatatataccccttgattttattttatcctacaaggaaaacacatacaataatttacagaaatttggtaacagtcaatcagcagggtaggctaatttggaacactataaacacacacgaaaaaaaatttaaattggctatcatttcacacatctgtagttctagctattcaggaggctgatgtggaaggattgctgaagcccaaaatttcaacaccagtctgggcaacatagccatanctaactgaaaaaatttgaagacattgttatgtatgtgtatatattatgtaattgtgattctttttaaaagttactttaattatatattttttattaattgatatgtaataattctacatatttgtggggtacagtgtgatacattttgatgcatatatatactgtgccatgatcaattaaaagtaattagcatatcaatcacctcaaacctttgtcatttctttctgtgagtaacgttcaaaatacactagatgctccagtgttgggtgcatatatatatatatttacaattgttattcctcatgatgaattgatccctttgtcattaca

SEQ ID NO: 3618 - DNA, 661 bp, Homo sapiens
  misc_feature [331]..[331]: Chromosome 8, SNP identification no. = rs4961118
  misc_feature [331]..[331]: allele = g, in linkage disequilibrium with rs1384747, respectively
  misc_feature [331]..[331]: n is a, t, c or g
atgtcctgtttccaatggacctcattgacttgtgtgccatttttctttttgcaactcaagctatgaatcatgacccaactaactggtccatcaagtggcctttctggaaaatgtctttgactctacttactcagcttttattgccctttgttttcattagagacaggttgtatgctcttattgaaaaatagggttaaactcttatgcttggaaccagctggggaaaagagagacagatgttgttggtcattattcaaatataaacacatatcaatgtgaaaatagtttactctacgtgtccctacactattaggggagactgtgccagaanctagaaggacaaagtgtaggtgtaccaacccaacctagcatattttattgcaactattaacaacaatactattttattttatttaactattggtaaaattatcattgcaactattaataatagttttatttttaagaaagaaaatatttggaataaatgctaatcagataaatgacaaggatacttgggaatcaactatgtatactacacacagatacacatacaagtatgtgtacccacgtgggcatgcacactagacgcacacacatatactgacatcctaatataaacatgaaaaagtacttttaagagagtggttcttaacatgtg

SEQ ID NO: 3619 - DNA, 661 bp, Homo sapiens
  misc_feature [331]..[331]: Chromosome 8, SNP identification no. = rs10955936
  misc_feature [331]..[331]: allele = c, in linkage disequilibrium with rs1384747, respectively
  misc_feature [331]..[331]: n is a, t, c or g
gagtaagtgctagagatgaaaaaaggtgagcctcaggggagggaaatgaaaaaatgggaatcgtggaaagagcagtgttgcttcaagtcttccagaagagcaccagacactggagcacagaattttaaaacatggaaaacaaaatacagctgaagatatttttatctgagagtagaaaaggatttcttcaataagacacaaatgtgtcaaccataaccaaaagattaataccttcaactatttttaattaagaacttatcttcatctttacctttaaagaaagtgaagcccagaaataaattcacacacttacagtcacttgattgtcagnaaatatgccaagaacacacaatgagcaaaatataatctcttcaataaatggtgttagggaaaccagatatctatatgcagaaacataaaattggagccttatctcacaatatacacaaaaactaactcaaaatagataaaagacttaaatgtaaaaacaaactgtaaaactaatagaagaaaacatacagaaaaagttttttgacattgagcaattgtaggggatccgtcagggtggtgggagaaattataaagataaagttataggaaatagacacaaaccttggaaggctgggaggtttgcatagcttcagtaaaagacttgactgaa

SEQ ID NO: 3620 - DNA, 661 bp, Homo sapiens
  misc_feature [331]..[331]: Chromosome 8, SNP identification no. = rs13275246
  misc_feature [331]..[331]: allele = t, in linkage disequilibrium with rs1384747, respectively
  misc_feature [331]..[331]: n is a, t, c or g
cttaaatcatattgtcatatacatttacatcctcatcataaattctctatactttgtcagtggtctccagattagtctttcttctttccatttattccaattcttggtactgtttatagaggaacattccaaaaatacagattttatgctactgttctagtttgaaaacataattccctggcactgtaagagaatacaatccaccttcttgggatggcatacaaagcactccataatttggctgctggcaaccttactattgccattttccaatcccatatttaatgtccaacaacacttggtcataaaacttgaagttccataagaaaanacactgtttgtcttaaatgactttgtttatgctatttcctctacttagtatgcccttttgtccacatggtaaacttttgtttttacttcaaaatgctatttaagtgtcatatctttccccaaagaaatattagaatcgattcagagtgcttattttctcagggtttataattaatggcatgctagtaaaagtttatcaaccacctctaaagacttttttaaaaagccctactttgtagcagttgtcaatttccatggtgtaaatatgcccaaattggccaattttaagcgactaaactggcattgctgaacaggaaattgaaaagagatg

SEQ ID NO: 3621 - DNA, 661 bp, Homo sapiens
  ATP6V1C1
  misc_feature [331]..[331]: Chromosome 8, SNP identification no. = rs2515197
  misc_feature [331]..[331]: allele = g, in linkage disequilibrium with rs2253218, respectively
  misc_feature [331]..[331]: n is a, t, c or g
aatttaacagttgattttattacctgccattttggggggagaggaggtataaaaatgtatcctttgatatactaacagaaaaccacttgcataaaattattataataaaatctcaatttttccagaaaccacgatcgcttagatctggattacaaaaagaggtttaaagatgctattagattttctaataactgaaaatgttaaagttcgagacagtttgtgctaaaaaagctagattcgctaagtgcgagagtattaactggaagcaaccggcgataggtggtgatgtgatccaggtgttgtgaagaacagagacaggatgacaagaagncaggatataggtccacgagatttcagcagggatttatttttaaaagcaacttcttgagataggttctggagttagtacaggtgtagcctgaactcccacacttgcaacattatgcagttagattgttggacatattgacccccgaaatacttttttaaatttattttttaaaaataaaaataattaaaaaaaaagagagacagggtctcgctatgttgaccaggctgatcttgaactccagagctcaagtgatcctcctgcctcaggatccaaaaatacttttaaaataaatcccaaactctaaaagcattgtctgcaatgtattatact

SEQ ID NO: 3622 - DNA, 661 bp, Homo sapiens
  ATP6V1C1
  misc_feature [331]..[331]: Chromosome 8, SNP identification no. = rs2515198
  misc_feature [331]..[331]: allele = t, in linkage disequilibrium with rs2253218, respectively
  misc_feature [331]..[331]: n is a, t, c or g
ctgataaaggtttaacttcatcagtaatgttagaaaagtccatatacagtacagtttcttttttaaaattttttttctagaatatagtttcttaacattcatttaataccactgtctgcatctgtaccaggtttaacctgcatttcttatctgtaaatgggaagcatgatatttacctcgtagaggtgttgggaagatgaattgagataataatgcatttaaagcagtaccttttatatggtagatcctctataaacagtagttagaaaaattaacaagtatataggatggcatctatgttaagttcactttcaatggtattgtagtgagnaggtagcattgattacctactcataggtactttaagtaggtactttaattaaattttaggactactgtaattatgaaagtccattattaactataatactttacattttaaaggaaatttacatttataaactcttttcacattaattatctgattttgttctcaggacaactttgtaagatagttatattcaatttagagacattgaatattagtttcaggagaggttaaataagcagtgttagcagaaagcttatgttggttctcatgaaggcagattaaaatggaaataatgataccataatactttgatttttatcatttgtgttt

SEQ ID NO: 3623 - DNA, 661 bp, Homo sapiens
  ATP6V1C1
  misc_feature [331]..[331]: Chromosome 8, SNP identification no. = rs2458290
  misc_feature [331]..[331]: allele = t, in linkage disequilibrium with rs2253218, respectively
  misc_feature [331]..[331]: n is a, t, c or g
ctgtgtctgttaatttgtgttttgagaaacaacgaaggtatgttagatattaataagttaatttgtgttgcctttactgatcttctacgtattttatgaactagggcagtcagtctagtaggtggaatggtggttgaccaagaggggcagtgcatctagatagagttgcttttggaaataccatccgtgttgttgactgactggtattatgtaaggagatattgagaagagaaagatatttttatatgaattacttccgtcagttggcgctgccataattaccatttggtttcaccgttcttgatccctttaggggtgaagtcactttgantactaaacttccaaggaataagttgttgagtatttttttagctctacatgttttattctttccatttgaaagtgaaagggtccatgttttgaaaattgttaaaatgtggactcctggaaacaatcatcacatggttttaacagacaagtttattttcagtttgtttgggtaagttatcaaagaaagaacatacttttatgaaattctacttattgaggagataatttgaagtagtttcttaatctttatgtctcctacatatgaggcatattaggaatatgtacatatttcatttttaaagtaatcaaattagaaggagcatcttaatat

SEQ ID NO: 3624 - DNA, 661 bp, Homo sapiens
  ATP6V1C1
  misc_feature [331]..[331]: Chromosome 8, SNP identification no. = rs2253218
  misc_feature [331]..[331]: allele = g, a
  misc_feature [331]..[331]: n is a, t, c or g
ggaattctaggaaacaaatggttttacaaagacttctacttacttgctagaccttggaactaccatttcggctagtgtttcatactgcttaatccagtcgttgtggtttaacctgcagaaaaggtacaatacacattggaaaagaaaaacaagtcctatttcctgccatatccaggaagagaaaaaattatgagacaaataggaaatctggctatagtaagtatacttcaactctatttaacaaaaaaaattcgggtttcctactgagaatgaatttcaaatacactgagtaatgcaggaaaaacagatcaccaccctacctccagtaacnattgcaaaagaggcacatcctagaactatgttcggaaaggaagtaaagcacagtatagattctaaattgttttcaagctgcatagttcatatgtattgtgcctcattttttaaaaatggtcatgctaaaatcactatcattcctgctcagtggccattatgaaggactgaaaaaaaactatatttatggaaagcacagagtaccatgaggtagtaagtaaatgaagtgacagtaaactatgttgccacaaaacattgtgcaacaaccttctctagaggccactggcttccaggggtgtggggagagacaactacgtttgagattgaaaac

SEQ ID NO: 3625 - DNA, 661 bp, Homo sapiens
  ATP6V1C1
  misc_feature [331]..[331]: Chromosome 8, SNP identification no. = rs2454045
  misc_feature [331]..[331]: allele = t, in linkage disequilibrium with rs2253218, respectively
  misc_feature [331]..[331]: n is a, t, c or g
caatgaaactggaaaagaaaatatttcatgggcctgaccttactaattccacttctttactgcctcctatatcttccaccctgctgcctccccttgaagcacatatatatctataagaatcctttggggtggagatacactgtatttatattttctcaaagaatatctggtgtggcaatggcagaacacagaaaaatgacatggaatagtgttaaaagggtacaggacctggagctaaaagatgtgagttctagccctaactctgccattggacactttacacagccatatgcctcaggcaactatttaagcattttaacttcttcttccntgagaataagaatgataactgtccatacttcttcacagacttgttgtaaatttcaaattagacaatgcatgttaaatctataaatttaaaaagtgcttaataaaaacaggtttgttttttaaataaaaggaacacacaaattaggtaaaatctaagctcaaagtgatggtgaacatctggagatcaacacggcagtccagtagccattctggtacacttcctttgccaagtaaaatgaggaattatagacacatagtaggtatgcaataatgaataaagaattttcaaaaggcagcacagtgaggcagaaaaagtaccacaccaaagacc

SEQ ID NO: 3626 - DNA, 661 bp, Homo sapiens
  ATP6V1C1
  misc_feature [331]..[331]: Chromosome 8, SNP identification no. = rs2515200
  misc_feature [331]..[331]: allele = g, in linkage disequilibrium with rs2253218, respectively
  misc_feature [331]..[331]: n is a, t, c or g
cctccagaccctatttcctgcctcagttctgctaccaacttgctgtgtgacctggggtaagtcttttaacttctctgggcctcattttctttgtctgtaaatggagcatagcaccttccttgtatatattatgaagttattttaagacttaatggagtattcaaaatacaagataatgttactgtattttcacaaatgttgatcttttaggaacttaacaacaaacttgtgctcatcatgaatgttttttttttcatttggaggaatatctttccttcataccagctcttcacatggtaaactgaagactacagttgtgtcttgatattgntggctcacttaggctgttgatactgacagatctttagggcattagagccgtagaggttgactctgtgtctaggaggcaggtagaggaggagagtgaggacgtggtgcacccagaatgtcctccagagatggacatacgccaacccagatgtccagggggatggtctgtaggctcattaagtaagctcagatttactctgatagaaagactttaaaaatattccatcagagatttagatctttggacagtcactttagtagtttaaagggcaaatttcaggaagggaacagtttaatgcagtcaagacttgtttgcaagtgacttgtaagt

SEQ ID NO: 3627 - DNA, 661 bp, Homo sapiens
  ATP6V1C1
  misc_feature [331]..[331]: Chromosome 8, SNP identification no. = rs2454043
  misc_feature [331]..[331]: allele = a, in linkage disequilibrium with rs2253218, respectively
  misc_feature [331]..[331]: n is a, t, c or g
ggtaagtttttgagtcagtgattccaaatgtactttgaactgagaaataggtagaaaagatgttttcactgagcaaggaaaggctggaagctctcggaagattagtgtgcacttacaagtcacttgcaaacaagtcttgactgcattaaactgttcccttcctgaaatttgccctttaaactactaaagtgactgtccaaagatctaaatctctgatggaatatttttaaagtctttctatcagagtaaatctgagcttacttaatgagcctacagaccatccccctggacatctgggttggcgtatgtccatctctggaggacattctgngtgcaccacgtcctcactctcctcctctacctgcctcctagacacagagtcaacctctacggctctaatgccctaaagatctgtcagtatcaacagcctaagtgagccatcaatatcaagacacaactgtagtcttcagtttaccatgtgaagagctggtatgaaggaaagatattcctccaaatgaaaaaaaaaacattcatgatgagcacaagtttgttgttaagttcctaaaagatcaacatttgtgaaaatacagtaacattatcttgtattttgaatactccattaagtcttaaaataacttcataatatatacaaggaaggtgc

SEQ ID NO: 3628 - DNA, 661 bp, Homo sapiens
  misc_feature [331]..[331]: Chromosome 8, SNP identification no. = rs7013533
  misc_feature [331]..[331]: allele = t, in linkage disequilibrium with rs17667338, respectively
  misc_feature [331]..[331]: n is a, t, c or g
catggaactctggagtgttgttcaaatcctgtgtgtgtgtatgtgtgtgtatgtctgtgtctgtgtgtgtgcgtgtacacatatgtggtattagcaacaaattagtaaaggaatcattagatggctggatttttgagaaagaggaagaatgatttttcatgattatgttaatatttctataaatggtttaacaactattattaactgaaataggaaacacatgagaaaacttatggggagtttagattacaaatctcattcgggtatattgatcttgatatcctttggaacatttatttaggaagacagattgacatatgctttaatgccnaggaggagacttgaactggatattttttaaactgtaccttttattttataattaaaacaaatttaatatttaaatgacccaacgtctatatctatgtatctatcttttgatatctatacaaagttatgtattcaacataatcaaaataaaattcccattaggttttgctttctgtgtagaaattaaaaaactcaatttataatttatagttaaatgcaaaggacccaaaagagtaaaatagtaaagataaacttgaagatgctggaggtctcatactcttagttatctagttaacaaagctgtaagaatcaatacagtatgtactgacac

SEQ ID NO: 3629 - DNA, 661 bp, Homo sapiens
  misc_feature [331]..[331]: Chromosome 8, SNP identification no. = rs7820058
  misc_feature [331]..[331]: allele = a, in linkage disequilibrium with rs17667338, respectively
  misc_feature [331]..[331]: n is a, t, c or g
tttcttataaaactaaacatgcttttaccatatgatgtagcaagcgtgctccttggtatttagccaaatgagttgtaaactcatgtccacacaaaaaatctgcacattgatgtttatagcagctttatttataattgcccaaacttggagagaaccaagatgttcttcagtagcttaatggataaatacacactggtacatccaggcaattgaatattattcagggctataaagaaatgagctataaagtcatgaagagacatggaaataacttaaatgcatattacttaacttagtgccagaaggcagtgtggatagattacatactctntgattccaactatatgataatgtggaaaaggcatttgttaaaacccatagactataaaacactaagctaaatcctaatgtgtactatggattggcgtaataatgtatctatgtaggtttgtcagttgcaacaaatgtactactctggtgcagaatgttcataggagaggaggtcatagattgaggggcagtgggtgtgtgggaactttctgtatcttctgtacaattttcctacgtacatgtgaaggcagataagatgtgggatatctctgtaccttctgagaaattttgttgtaaacttgaagtggctctaagaaactaaagtcaataa

SEQ ID NO: 3630 - DNA, 661 bp, Homo sapiens
  misc_feature [331]..[331]: Chromosome 8, SNP identification no. = rs17729017
  misc_feature [331]..[331]: allele = c, in linkage disequilibrium with rs17667338, respectively
  misc_feature [331]..[331]: n is a, t, c or g
cagatattacatttcattatcttaatcatactggatggtgcccaagaaagtatgttttctttataatttgttaaagtgaaagtcgtgttcactgaaaattgctcatgatttagctcatcctgagataaatattcttaaaagcaggaaaatattttacacttcccagaggtaagttatagccatatgcattggacacatgtaagaaatgtaaatattatgtaataaaatgtatttcaaaaatgtaggaaactatttctatttctattaaattatgtttaaatattctcgccaatcctatgtcctcctctaaccacaattgtttcttcacatnttcagagctaaactcttgaaaagatgactttcattaccattttcatatcctcacctattatttcttatttccagctttccagtctcatatcttttttaccaatgcactaaattgtctctcacaaatttacctttagttaccaaatctgatacttcttcagcctttgcaatacatgataactatgtagttatttgatactattgaccactccttctattcatttgtttttgaaatcctgacctccgaaaacctactcatataatctccatttcatttgatagatactcagactgaaattcttaggatcatcgcagattgttctttctctca

SEQ ID NO: 3631 - DNA, 661 bp, Homo sapiens
  misc_feature [331]..[331]: Chromosome 8, SNP identification no. = rs17667338
  misc_feature [331]..[331]: allele = a, g
  misc_feature [331]..[331]: n is a, t, c or g
gttccaattcagtttcttttctttgttcctttaattctgattcttaacactttaagtgattctttaaaaacataagtcagatcatgccacttctcttctcaaaatctggaaatggcttccaaattcactctgagtataaaccaaagtctgtacaatgatctataaggccctgcaacatctgcccctgttcctacgacctctaacttcacctgaaaacacctttagctctttttcagtaagccagcaagcatgcctgccatttttaaaacattgttgtagatgaatagattagaaaatctgttttgattgcctagggaaaaggaaaacttcntgaccagccaaaccacaggaaatacaggtggcttcaggagcaaccagaacaaatctttaatggtgtcagtagtctttctttcaacattcattcttttttaacgaaagaattttaaattctgttgcaaaaagactaccgataccataagaatgttatctggataaaagtataatgtactcagaaactctatcaatgagctatgctcaggatgagcatgattttctggccctatgagaactacattggaaatgagagaggagtagctctccaagttgagagggttttcatgtccccaaattggaaaaactacaagttaaagaaaacacatta

SEQ ID NO: 3632 - DNA, 661 bp, Homo sapiens
  misc_feature [331]..[331]: Chromosome 8, SNP identification no. = rs17729107
  misc_feature [331]..[331]: allele = a, in linkage disequilibrium with rs17667338, respectively
  misc_feature [331]..[331]: n is a, t, c or g
attttaaattctgttgcaaaaagactaccgataccataagaatgttatctggataaaagtataatgtactcagaaactctatcaatgagctatgctcaggatgagcatgattttctggccctatgagaactacattggaaatgagagaggagtagctctccaagttgagagggttttcatgtccccaaattggaaaaactacaagttaaagaaaacacattactataatgagaaaaacattagatatattatatttataatatgacaccatggatgtcctgaggtctcatataaccatggtctaaaacaaatcacatactatattgtgctnttttcaagtttttaaagcttaatatcagatagtactggtttatttgtcatattgataataccaatgattgcaaaatcttgactttattagcatctttatattggaaccacctgaaaacactaaagtctaaataagtgtctatgcaaaggaaaacattacccaaatgagcatataatgggctaccactacagtgtcttggaaagcctgaatccatggagcaagattagttaacaaaaaaatgtctgtccaaatatttaaatatgtcagcatagcacaaaggaggaaggaaattgatgattcttcagttgtcagaatttatagttagctgat

SEQ ID NO: 3633 - DNA, 661 bp, Homo sapiens
  misc_feature [331]..[331]: Chromosome 8, SNP identification no. = rs17667594
  misc_feature [331]..[331]: allele = t, in linkage disequilibrium with rs17667338, respectively
  misc_feature [331]..[331]: n is a, t, c or g
ttatttcactgggcagtgcatatgtctaattcaagtaacagtgacaaacattaagaatgttattattatatttttcattctgtagaagcttgttgcgtatctagtccctctactgaactgtaagctccacaggatgaagaatcaatattggttttgttccctattataccacagtctctgactccatgaaatatctggtgattgaatggtcttccataatatagttaattaatttataattcaaaaatttaagtagcttgccgatgaaacgacagttaataaattatgaatttgggcttcaagttcaaataaatcttaacctagaattaangcccctccttaccctacacaatctttgaaaacatttgttgtggtgaaatatataaaaattttatcatttgaaactctacaattcagtggcatttaatacatttacagtgttgtgaaagtgtcaacattatctggatccacagcattttcatcacatgaaaaggaaactccaatctcattaattcccaattccttcttcctccaagcctctgacgaccactaatttgcatactatttccatgaatttacctattctggctccttcattcatcatgacatttataatgctcattcattttgcaacatttatttatatttcatttaagtgctg

SEQ ID NO: 3634 - DNA, 661 bp, Homo sapiens
  misc_feature [331]..[331]: Chromosome 8, SNP identification no. = rs10505232
  misc_feature [331]..[331]: allele = a, in linkage disequilibrium with rs17667338, respectively
  misc_feature [331]..[331]: n is a, t, c or g
gcccccaaagggagacttagccagtcttaaagcaaattaaatctatctctttatctatatctacatctatttttttttcatatgggcctaaatagtacaaataaattgggtttacattttgcatactaactatagaattaaacatcttctttagaaataaatcagtgttagagttatgctgtgttattgtcaaaatctaagcaggaagaatttttaaagtttttaaaggacctaaacattaagatattagaaactgtatacagttcttcttaattaccaaataactaaaatggttattttctctaataaataaattcctttgtaagtgatnggccaatattagagtactttgctaatacatcaaaaatatatgaagttgataatataaaaactaccttgaagcccaattttaaataaataatatgtacataaagaggtgatacaaaaagaaagcagaaacaaatgttatgaattacccattaaaatgttacctttttaaagtacacttttcatatactaactccaagtttaatataatattccatttttgtgaggagaataaaggaatctcttccatatgtgtgtaaaatatatgcactaaattacatcttggacaggatttccttaatattagagtagcatcatgataataaattatcta

SEQ ID NO: 3635 - DNA, 661 bp, Homo sapiens
  misc_feature [331]..[331]: Chromosome 8, SNP identification no. = rs17729672
  misc_feature [331]..[331]: allele = a, in linkage disequilibrium with rs17667338, respectively
  misc_feature [331]..[331]: n is a, t, c or g
tcctccagaaatgaatctactccatcatcaatcagttcattcaacacacattggaacgatttatactacatactgcaatgaatgttgttatgtaaagtgaatttagatatagtccatgacccctgaatcttgcaatctaataaattacatccatattgtgaatccattgtccagtgtgtcatactggacaatcgagaggagaattacctcaaaactcaactcaaatttcctgccaatcacctagttgccttaaagttacttggtacttaccttctttatgaaaataatcatgtcaagctctactatttcccattataaattagagaagtgngtattaaagaggttaggaaaattagcaaaggataaaataccagtaagaaaagatccaggattagaaaacaggtctttatggtaaaaataacatcatcaaatgccacaaaatattagctgcttgtaaacactaggaacacatgttacagaatcttctgtcatatcttccccttctgtttctcccaaaaacaagcctactccttatcagggctcctagcctaaaactactactaattccaaatcccagccagagcttccattatcacacatatgcttaacccaggcagggagcagagtcagctgcacatgatttttcaaaaaataaactcaa

SEQ ID NO: 3636 - DNA, 661 bp, Homo sapiens
  misc_feature [331]..[331]: Chromosome 8, SNP identification no. = rs10505238
  misc_feature [331]..[331]: allele = c, in linkage disequilibrium with rs17667338, respectively
  misc_feature [331]..[331]: n is a, t, c or g
agcaaatcttattaaaaatttgtaaatatcaatagactgtcccccaaaatacacataaccctaaaatgctctatctccacttgtagccaaagagatttcaaaccacagagatgggattgaattttccttgaacagtctgtttacacaggaaaaatttattcaagacatggaactgctcttggcacctgactgagacgcagaaatatttcctccttgctctaatcatgtacggcatttcacacatggatgctcatccaatcacacagcatgccagatctctcagaatcctttggaatgctaaaaaccctatgtgtgtatatataagtccagngagttgggataggaaaggtcccttaatgcagagtagtaaatctacacaggactgagtaaaatgttttatcagctgggatttccctacacaatcttttctaccatttatatagcagtacagatgcagaaaactcaaaaatattaatatctgggcaaaacatcttcaatgtagttctaaaattaatattgattatggcacaagaaaaatagagaatggggaatgttacgctctggcatcatttattttccaaaaccatgttttcagtacgataaatccttacacaatttcaaaaataactctgtaagctttttaatacacataagatgaaag

SEQ ID NO: 3637 - DNA, 661 bp, Homo sapiens
  misc_feature [331]..[331]: Chromosome 8, SNP identification no. = rs17729840
  misc_feature [331]..[331]: allele = t, in linkage disequilibrium with rs17667338, respectively
  misc_feature [331]..[331]: n is a, t, c or g
acagatgcagaaaactcaaaaatattaatatctgggcaaaacatcttcaatgtagttctaaaattaatattgattatggcacaagaaaaatagagaatggggaatgttacgctctggcatcatttattttccaaaaccatgttttcagtacgataaatccttacacaatttcaaaaataactctgtaagctttttaatacacataagatgaaagttgtaactgagataaaacataatatttagtaaatactttataatattttattgacagtgcatttatttaaacattatttgtctgtacccaaacgtcttagggattatatgtcctctnagctcctatgagaggtagattgataaaaagcatttattaattcaagacttattacatgtgaaatgtattaaatatagccctcacctcggaaggagcaggataaatgtaatcctctctgcatctgtgggtgcattactctgcagttattctgtaaatcatctgtaatagtgaatacctcattcatagggttttgcattatgcatagtttgccccctgaaggcattccacacaaacagaagccatttcccatgaaaatattttatcctttaaagtacaatagcacttaataatatggggaattttaactatataagctataaaaatcttcac

SEQ ID NO: 3638 - DNA, 661 bp, Homo sapiens
  misc_feature [331]..[331]: Chromosome 8, SNP identification no. = rs7816550
  misc_feature [331]..[331]: allele = c, in linkage disequilibrium with rs17667338, respectively
  misc_feature [331]..[331]: n is a, t, c or g
tgcatctgtgggtgcattactctgcagttattctgtaaatcatctgtaatagtgaatacctcattcatagggttttgcattatgcatagtttgccccctgaaggcattccacacaaacagaagccatttcccatgaaaatattttatcctttaaagtacaatagcacttaataatatggggaattttaactatataagctataaaaatcttcacaatctgccagcagttacgtcctcattgatgtattcgtttccttactttctagggtcacctgggttaacacaaccacttagataaaaatattacacagtagctgatggatggcacttnccattaaagatgttaccgaaagtaagaagtatttaaggtataccccattcaccatagcagctcatataaaatgttagtacaagctgactaagaactgctcacctctaagaactcacataatcaaaagcattcttttgagatacatttcttttggacataaacctttgttccttaaaatcattggtattcttcacaatatcaaatatgctaaaactgatcaaatataaatgaagttagaataataaatagcattcttactgactgagatgaaagaatatgtatggctgactatcagaaatacatataatcagtgattataatggtagattt

SEQ ID NO: 3639 - DNA, 661 bp, Homo sapiens
  misc_feature [331]..[331]: Chromosome 8, SNP identification no. = rs6986512
  misc_feature [331]..[331]: allele = g, in linkage disequilibrium with rs17667338, respectively
  misc_feature [331]..[331]: n is a, t, c or g
gatacatagtattggtattacaatccctctggtatagattttgctttcataattttgctcgttcttcatgaaatttacctgattccctttattgacaggttctcagcatgttttccatctggatttttaatctgggtaatgatctagttctatttctctagactctgccccacatttcttctttgtcacgtctagtttatatagaccaggtattctcaacaaaggacaattttcctttccaagggatatttggcagtgtctggatataattttcattgctacaactggcagggtgttattgacgtctagtggatggaggacagggatgctnttaagtatcctacaataaacaggacagcctctcacaataaaaattattccagcaaaaatatgtcaatagtgccaaggttgagaaacccagatttatacttaaattttcccatttcccttctaaaatggctgctaattagaagcatgtttgtactatgaagatcagaggagaagggaggaataatgcacattcttttcagattattaaaacccagcataatgtggaaagtcatactttataagaaggtatatcttttgttaatgcaatttttattgacattaagatacataaggaaaaatacacaaaccataaatacgcagctcaaaaaaa

SEQ ID NO: 3640 - DNA, 661 bp, Homo sapiens
  misc_feature [331]..[331]: Chromosome 8, SNP identification no. = rs16886603
  misc_feature [331]..[331]: allele = t, in linkage disequilibrium with rs17667338, respectively
  misc_feature [331]..[331]: n is a, t, c or g
tgtctggatataattttcattgctacaactggcagggtgttattgacgtctagtggatggaggacagggatgctgttaagtatcctacaataaacaggacagcctctcacaataaaaattattccagcaaaaatatgtcaatagtgccaaggttgagaaacccagatttatacttaaattttcccatttcccttctaaaatggctgctaattagaagcatgtttgtactatgaagatcagaggagaagggaggaataatgcacattcttttcagattattaaaacccagcataatgtggaaagtcatactttataagaaggtatatctttngttaatgcaatttttattgacattaagatacataaggaaaaatacacaaaccataaatacgcagctcaaaaaaaattccataataaacacatttagatagccagtacccaagtcaaggaacagaatgctaccaggaccagtgtagtgtccttctaattttgaatattcagccctatacttccttctgagttattgacttatatatccaactacctatagcctttttactaattttaatgggtactcgaagaggaaatacatgtttctttagcaccatcttaagtcagaattttttttcagtaaagttgaggattgattagatagaaatag

SEQ ID NO: 3641 - DNA, 661 bp, Homo sapiens
  misc_feature [331]..[331]: Chromosome 8, SNP identification no. = rs7015520
  misc_feature [331]..[331]: allele = g, in linkage disequilibrium with rs17667338, respectively
  misc_feature [331]..[331]: n is a, t, c or g
ctaacatttttcatagttaagttcttatccttgattaaagtaaaataagaagtattgtagagaaatgcataagcagtttggcaattctttttttaatatagttaagcatgaagctggatttactgtggagccaaatttcacatacatgcttgcattgcttcacactatatttaccattttgcatggatagtgctagagtattaattggtcatgtgcctatagtgaatttcttgattgcatagaatgtataataatattggagaacttaagggtattaaattttgtatcaggaataaaatattcaatctgtggatttttagggggctctggntaacactgtagcctccagggtagattaaatagaaaaaaaaaatagggttagttttctgtttatttgtttttgcttctagttttcatttgttggctgtttactctccatttattttggattcctaagctacctttgtcaagcccacaggaattaatggagcacaccagccttttaaccttaaactagcttttttaattttaggcttcctgatactttaagtgtgttgagtgtacttttataaatagaatttgattcacatttctctctctgcctaatttttccaaaatttgtaaattatttgtgaatattcttaattcatggcaatgtgtt

SEQ ID NO: 3642 - DNA, 661 bp, Homo sapiens
  misc_feature [331]..[331]: Chromosome 8, SNP identification no. = rs6980860
  misc_feature [331]..[331]: allele = c, in linkage disequilibrium with rs17667338, respectively
  misc_feature [331]..[331]: n is a, t, c or g
agcataatgaatctgctgttaatgcttcttcttttattttctttttgttgtttctgttggcaagtaagtttatatgagcttttcaaattttttttagcagtgtttaaaaaatccaatagtctagcacttagtagttctatagatgtccggaggcaaagcacaaagcatctctttggcaagtgtggactgtcaaagaagcaatgtggtactgatctcacagaagtggtgatagcttcctggtcatgaagaagtagagttccctcatgctgctatagagctttgagtagtgcccctaaaacagaactcaagactgtgcttctccagccaatcnaatggttctatatgactttttctcatttgttaaaaaataaaaaagtccttcctgcttatcttgggtgtaatggatttgattttctaacagatataataatttgtattaagatctgctctgatgatattattaaggataccttcattcactctttaaaacaattttagtttgtactgaaatgatctcatcaacaaaaaccattttcttcaaattatttagtatatacctgttaattgggtttcttaactgagcaagcttggagaatcacaacagggaaagactgtaatttagaatatacttgggcttcaaaatttggagatagaaaggaag

SEQ ID NO: 3643 - DNA, 661 bp, Homo sapiens
  misc_feature [331]..[331]: Chromosome 8, SNP identification no. = rs2357737
  misc_feature [331]..[331]: allele = g, in linkage disequilibrium with rs17667338, respectively
  misc_feature [331]..[331]: n is a, t, c or g
tcattaaaaatattgagtcaaaggtatttcttattttgaagggtaaaaaaattagttcagttcctctatagacttaaaacataacagtatcataagagaaattaaattgagatgaatatgaattcatatatcagatcaataaagtgatttatgtgaaaagcttgcaaaagtgtatattatcacatgttaagagcaagaagaatgttataccaagtgcagagagttcagatcaaagaaaaataaacatacttttaaaagttaaaaactatttaaaagaattcatgaatatgaagaattaatggaagcaaacacattccatgccattaaaagntaatttgaaggattaaaggaactcttatgatttaaagtcacaccttcagagaattttgtgaatattttaaacgtacagacaaatatagcatttattcaattcagtaagacgtagtggaattctgtacaaattgtaggatgagaagagatgtgaacaacaaaattcacgtataaaagaatgtgtttatttatctatttatttatgtagcaaaaaaatggaaggataccttgccagatgctgaggaatattttttaatatggatatatgcattttcctctgccacttactatgtagaaaagaagacagacattggtcaaaatttcaaggtgg

SEQ ID NO: 3644 - DNA, 661 bp, Homo sapiens
  misc_feature [331]..[331]: Chromosome 8, SNP identification no. = rs2357738
  misc_feature [331]..[331]: allele = c, in linkage disequilibrium with rs17667338, respectively
  misc_feature [331]..[331]: n is a, t, c or g
gatgaatatgaattcatatatcagatcaataaagtgatttatgtgaaaagcttgcaaaagtgtatattatcacatgttaagagcaagaagaatgttataccaagtgcagagagttcagatcaaagaaaaataaacatacttttaaaagttaaaaactatttaaaagaattcatgaatatgaagaattaatggaagcaaacacattccatgccattaaaaggtaatttgaaggattaaaggaactcttatgatttaaagtcacaccttcagagaattttgtgaatattttaaacgtacagacaaatatagcatttattcaattcagtaagangtagtggaattctgtacaaattgtaggatgagaagagatgtgaacaacaaaattcacgtataaaagaatgtgtttatttatctatttatttatgtagcaaaaaaatggaaggataccttgccagatgctgaggaatattttttaatatggatatatgcattttcctctgccacttactatgtagaaaagaagacagacattggtcaaaatttcaaggtggagtgctatgaatagtaaagattggtatgctatagaaacatgtagcactaaggcttgtttgaaaaacatgattactgcaattggaatcaggaaaaatatattgaaaataag

SEQ ID NO: 3645 - DNA, 661 bp, Homo sapiens
  misc_feature [331]..[331]: Chromosome 8, SNP identification no. = rs4484727
  misc_feature [331]..[331]: allele = t, in linkage disequilibrium with rs17667338, respectively
  misc_feature [331]..[331]: n is a, t, c or g
ggaaggataccttgccagatgctgaggaatattttttaatatggatatatgcattttcctctgccacttactatgtagaaaagaagacagacattggtcaaaatttcaaggtggagtgctatgaatagtaaagattggtatgctatagaaacatgtagcactaaggcttgtttgaaaaacatgattactgcaattggaatcaggaaaaatatattgaaaataagcttagttcctcttttggtaattgtctgttttttattttactttacgttcaatggtgaaggaagaagtgttgattgtatgaaaataataaattgtgttcttgattttntaagcagtaaaatcttgaatgtgatatcttaggatactatttccagtgctttggtgagaagaattaatagcacaatgattctatattatttttaaagtaaaatacattttgacgtactaatattggactttaaaaggaaaagaggttgggcgtggtggctcacgcccgtaatcccagcactttgggaggccggggcgggtggatcacaaggtcaggagatcgagaccatcctggctaacacagtgaaaccccgtctctactaaaaatacaaaaaaaaaaaaaaaaaattagccgggcgtgatggcgggtgcctgtagtcccagctactcg

SEQ ID NO: 3646 - DNA, 661 bp, Homo sapiens
  misc_feature [331]..[331]: Chromosome 8, SNP identification no. = rs4270996
  misc_feature [331]..[331]: allele = t, in linkage disequilibrium with rs17667338, respectively
  misc_feature [331]..[331]: n is a, t, c or g
gaaggataccttgccagatgctgaggaatattttttaatatggatatatgcattttcctctgccacttactatgtagaaaagaagacagacattggtcaaaatttcaaggtggagtgctatgaatagtaaagattggtatgctatagaaacatgtagcactaaggcttgtttgaaaaacatgattactgcaattggaatcaggaaaaatatattgaaaataagcttagttcctcttttggtaattgtctgttttttattttactttacgttcaatggtgaaggaagaagtgttgattgtatgaaaataataaattgtgttcttgatttttnaagcagtaaaatcttgaatgtgatatcttaggatactatttccagtgctttggtgagaagaattaatagcacaatgattctatattatttttaaagtaaaatacattttgacgtactaatattggactttaaaaggaaaagaggttgggcgtggtggctcacgcccgtaatcccagcactttgggaggccggggcgggtggatcacaaggtcaggagatcgagaccatcctggctaacacagtgaaaccccgtctctactaaaaatacaaaaaaaaaaaaaaaaaattagccgggcgtgatggcgggtgcctgtagtcccagctactcgg

SEQ ID NO: 3647 - DNA, 661 bp, Homo sapiens
  misc_feature [331]..[331]: Chromosome 8, SNP identification no. = rs4300037
  misc_feature [331]..[331]: allele = c, in linkage disequilibrium with rs17667338, respectively
  misc_feature [331]..[331]: n is a, t, c or g
gctatgaatagtaaagattggtatgctatagaaacatgtagcactaaggcttgtttgaaaaacatgattactgcaattggaatcaggaaaaatatattgaaaataagcttagttcctcttttggtaattgtctgttttttattttactttacgttcaatggtgaaggaagaagtgttgattgtatgaaaataataaattgtgttcttgattttttaagcagtaaaatcttgaatgtgatatcttaggatactatttccagtgctttggtgagaagaattaatagcacaatgattctatattatttttaaagtaaaatacattttgacgtantaatattggactttaaaaggaaaagaggttgggcgtggtggctcacgcccgtaatcccagcactttgggaggccggggcgggtggatcacaaggtcaggagatcgagaccatcctggctaacacagtgaaaccccgtctctactaaaaatacaaaaaaaaaaaaaaaaaattagccgggcgtgatggcgggtgcctgtagtcccagctactcgggaggctgaggcaggagaagcgtgaacccgggaggcggaggttgcagagagccgagatcacgccactgcactccagcctgggtgatagaccggcgactccgtctcaaaataataata

SEQ ID NO: 3648 - DNA, 661 bp, Homo sapiens
  misc_feature [331]..[331]: Chromosome 8, SNP identification no. = rs11987323
  misc_feature [331]..[331]: allele = c, in linkage disequilibrium with rs17667338, respectively
  misc_feature [331]..[331]: n is a, t, c or g
tggctaacacagtgaaaccccgtctctactaaaaatacaaaaaaaaaaaaaaaaaattagccgggcgtgatggcgggtgcctgtagtcccagctactcgggaggctgaggcaggagaagcgtgaacccgggaggcggaggttgcagagagccgagatcacgccactgcactccagcctgggtgatagaccggcgactccgtctcaaaataataataacaataattaatttaaaaaaaaggagaagaaaggcattaaagtagaatgcgaccctcttttaactatttcaaaattagccgatctcaattgttaaaaaaacattgactttcaganctagggcatagctcaaaggcctttcattctaatttcttagacacagataattcaaatgtcttccgcatctcttaggatatcaccaataataggcacattctcacacttcttgaagaaacctccttttttttttttttttttggaaagttatatttcaatgtttacatacagtccaaattagtgtctatacacactacatcattgattccacttatatgtctggtgtctctgatacttctttcttctacagtacagaccgttgactattttgtaattagctctcatctcatttacttctgaattattctgtttcccaagctaaatatttcc

SEQ ID NO: 3649 - DNA, 661 bp, Homo sapiens
  misc_feature [331]..[331]: Chromosome 8, SNP identification no. = rs11987349
  misc_feature [331]..[331]: allele = c, in linkage disequilibrium with rs17667338, respectively
  misc_feature [331]..[331]: n is a, t, c or g
aaaaaaaaaaaattagccgggcgtgatggcgggtgcctgtagtcccagctactcgggaggctgaggcaggagaagcgtgaacccgggaggcggaggttgcagagagccgagatcacgccactgcactccagcctgggtgatagaccggcgactccgtctcaaaataataataacaataattaatttaaaaaaaaggagaagaaaggcattaaagtagaatgcgaccctcttttaactatttcaaaattagccgatctcaattgttaaaaaaacattgactttcagacctagggcatagctcaaaggcctttcattctaatttcttagacanagataattcaaatgtcttccgcatctcttaggatatcaccaataataggcacattctcacacttcttgaagaaacctccttttttttttttttttttggaaagttatatttcaatgtttacatacagtccaaattagtgtctatacacactacatcattgattccacttatatgtctggtgtctctgatacttctttcttctacagtacagaccgttgactattttgtaattagctctcatctcatttacttctgaattattctgtttcccaagctaaatatttccagtttcaccagaaatcagaactatttctccatgctacacattat

SEQ ID NO: 3650 - DNA, 661 bp, Homo sapiens
  misc_feature [331]..[331]: Chromosome 8, SNP identification no. = rs7005793
  misc_feature [331]..[331]: allele = t, in linkage disequilibrium with rs17667338, respectively
  misc_feature [331]..[331]: n is a, t, c or g
agtagcaaaaatgcttaaaaataaaagagactctgagatagtggctagctaactgacaagtatgcagatgaactttatcttctgcaaaattcatagagtagcgtgtctctttagaaagcagcccttgaaagtctgggattttctgatgcataaagaagtgctctaaaaatgccagggaggtagaacactcattgtgcttgtcaatggaatgtcccattagtaacccctgtggaaatcacaaagctcccaagcacattgagtcatgaaggtcaccctgcataaatctgtctacattcatgagttgctaccgctaactgccaccacatcaagntcagtgtacaccccatgctgctgaaatggcgggacacattgaataaaatccaagctcctacattcacatttctttttgtttatctttaaggcagtacagtatctattcagaaacgtgcccttgagcatttgcatatctggaacagcagtccctaatcctcccaagctttgagagaggcatgtattattggtttgcacacatttcaagagaaaaatgctggccacagctcctactacagaaatatgacatagcatattcttagtcttgcaacactgagaaattgaaatagctaggcaaataatcataattctaagctctgacaactaaaga

SEQ ID NO: 3651 - DNA, 661 bp, Homo sapiens
  misc_feature [331]..[331]: Chromosome 8, SNP identification no. = rs6989745
  misc_feature [331]..[331]: allele = c, in linkage disequilibrium with rs17667338, respectively
  misc_feature [331]..[331]: n is a, t, c or g
cctgcataaatctgtctacattcatgagttgctaccgctaactgccaccacatcaagttcagtgtacaccccatgctgctgaaatggcgggacacattgaataaaatccaagctcctacattcacatttctttttgtttatctttaaggcagtacagtatctattcagaaacgtgcccttgagcatttgcatatctggaacagcagtccctaatcctcccaagctttgagagaggcatgtattattggtttgcacacatttcaagagaaaaatgctggccacagctcctactacagaaatatgacatagcatattcttagtcttgcaacantgagaaattgaaatagctaggcaaataatcataattctaagctctgacaactaaagataatcatttttacatcaaaataatagtagttatgctatactgtggtatatgtttacaaattttacagcttaaaaattcttgaagcattacttgttttatttccaaacattgtaatggggtgatgttaactttaccattctatagataagaaaacactctcagaaaagctagggtactcaatgaagtcaattaggacttagatttaaattctggtccaaatgcaatatcctgtaaattttggttctgattttcaaaagtaaagatgtgtaattt

SEQ ID NO: 3652 - DNA, 661 bp, Homo sapiens
  misc_feature [331]..[331]: Chromosome 8, SNP identification no. = rs9632821
  misc_feature [331]..[331]: allele = c, in linkage disequilibrium with rs17667338, respectively
  misc_feature [331]..[331]: n is a, t, c or g
aaaaattcctattgagttctattctcattacctgggtaacaaaataatctatacaccaaactcccacaatgagcaagtttcccacgtaacaaacttgcgcaagcaccccctgaaccaaaaataaagttggataaataaataaataataaaatcacacaaagcaaggaaaaaaataaaacacaagtggtttagattttttttttctcctttaaatagcttttatttttaaggcaagtttcaggttcacaggaaaacagaatagaaagcacagaaaattcccacataccccctcacctgctccccatggcctcctctcctatgaatattctgnaccagagcggtacatttattgcaactgatggacatacataaacatgttactacccaaatccattgtacacgttagggtttagtcttagcgttgtatactctatgggttttaacaaatgcgtactgaccagtactcaccataatagtgtcatatagaatagtttcattgccctgaaatcctctgtgctccatatattcatccctctctccctataaatttctggtaactactgatctttttactgtctccatagttctgtctttttcaggataccaagtacttggaatcatccagtatgtagcctgtccacacttccttcttagtaatatg

SEQ ID NO: 3653 - DNA, 661 bp, Homo sapiens
  misc_feature [331]..[331]: Chromosome 8, SNP identification no. = rs7835429
  misc_feature [331]..[331]: allele = g, in linkage disequilibrium with rs17667338, respectively
  misc_feature [331]..[331]: n is a, t, c or g
atagtctttatgtttcaaatagagggagcaatctttataaaaattcagaagcattaaatgtcatattttataagtaactataaacagaaaatttatactgcaaagcgaaatgttaatcagggactggtaaaagattcagttgaaaaagtgtaattgtcggtttagagagttttggacatctttctaaggtgtctgaatgatacaaacaggaatcattgaaagcttttaaacaaaatgaaataatcatacaagcagtgtggaagataaatataaaggtagaaagaatggcgtctaggtgttgataatttattgttttagttgaggttaaatntgatgagggtaaggctttaccttttagtaataatagtagctaacatttattaatcacttttcaacctctatatgtattatctcacttaatctggaagcaactctgttagttatcatatttgtagctctactttacagattaaggaaccaaggacattgttataggccaaattgtgttccatcaaaatttatacattgaagtattaacttcccatacttcagaatgtgactgtatttgtagacaagatctttaaagaggtaaagtaaagtgagataatatgggtaagcaataataaagtatgactgttgtccttataagaagaggagatta

SEQ ID NO: 3654 - DNA, 661 bp, Homo sapiens
  misc_feature [331]..[331]: Chromosome 8, SNP identification no. = rs1872781
  misc_feature [331]..[331]: allele = g, in linkage disequilibrium with rs17667338, respectively
  misc_feature [331]..[331]: n is a, t, c or g
cactttccttctgaatcctaagtgaacacacagagtgccctgactgccctgtgacccggccagctgcagatttttcccagcaggcttgaatgcaaaactagtctttgaacattcctaggaactgatacaaatatctaggttgctgcccaaagcactgaaacaatcaacccctggcccttagccattaaaccgtcatacaaactccatactctgattctcccactgtagacatacctactggattattgctttctttctctgtctttcatgaggatatgctgcagcaccatacaagtaagttctcctaatacatgctttggacagatcaccntagatcaccctgctgtttagtgcttctttctttggaatcccaactggccccatttccagagggtttggggcactcccttatgggaactcccctaatgctgcttttgagacaattccagtcataagtttgtcagaaagaaacagaatttgtccgtcttctgtggagaaagtacttcttaaatatcagtgactcctttggcttttgtaatgttagtttttccttttcagttttgtatctcactctttattattttttctgtatttcactcatggattttcctcctctccttaaaagaaaatgttcctccagagtctcctattgggctctcgc

SEQ ID NO: 3655 - DNA, 661 bp, Homo sapiens
  misc_feature [331]..[331]: Chromosome 8, SNP identification no. = rs1872780
  misc_feature [331]..[331]: allele = a, in linkage disequilibrium with rs17667338, respectively
  misc_feature [331]..[331]: n is a, t, c or g
catcttgaaagacataaggtgttgtctcattgtggttttgatttgcattttcctactgcttagtaatgttgagcaacttttcaaatacctcttggccatttgtaaggtcccccagttttcccactttccttctgaatcctaagtgaacacacagagtgccctgactgccctgtgacccggccagctgcagatttttcccagcaggcttgaatgcaaaactagtctttgaacattcctaggaactgatacaaatatctaggttgctgcccaaagcactgaaacaatcaacccctggcccttagccattaaaccgtcatacaaactccatacnctgattctcccactgtagacatacctactggattattgctttctttctctgtctttcatgaggatatgctgcagcaccatacaagtaagttctcctaatacatgctttggacagatcaccctagatcaccctgctgtttagtgcttctttctttggaatcccaactggccccatttccagagggtttggggcactcccttatgggaactcccctaatgctgcttttgagacaattccagtcataagtttgtcagaaagaaacagaatttgtccgtcttctgtggagaaagtacttcttaaatatcagtgactcctttggcttttgtaatg

SEQ ID NO: 3656 - DNA, 661 bp, Homo sapiens
  misc_feature [331]..[331]: Chromosome 8, SNP identification no. = rs9297536
  misc_feature [331]..[331]: allele = a, in linkage disequilibrium with rs17667338, respectively
  misc_feature [331]..[331]: n is a, t, c or g
ggatgtacaccctgggctgaagggctgagggagaggaagctggggaccctgcatggcatggccaaccaccaagactcattcctgaccttgagcaattactagggaatggatcagttaaatagatgtggagtggcctactcttgccagggacctccagaatcctggctgcaggatactcaattgcacacctggacatttgagctggtagggagagctgcttggagagttggcaggaacaggactctagcctgtccagagcccagaggttttgccatgggaatggctacagtggagcatggccaagtatgcctatacccccatctcaccatgntcctctaggtggctttggtctttgttgactgttgaaccttgacagcacagggctgccttgcctgtgggatggagtcattctgaccttaatgccccactctctaccagcctttgccagggcccctacctggccatatctgcttgcagtacagcctcggatgctcaactgaggcatttcacagcagccactgccacaactacttcactggcagacccctacctaaccatcagagagcttctgctgatggtcccccaccagcacaaaaccacctgcatcctccccctaatactttgatggtgctcattcaactgcagcctactaccaatactt

SEQ ID NO: 3657 - DNA, 661 bp, Homo sapiens
  misc_feature [331]..[331]: Chromosome 8, SNP identification no. = rs10109921
  misc_feature [331]..[331]: allele = c, in linkage disequilibrium with rs17667338, respectively
  misc_feature [331]..[331]: n is a, t, c or g
caatctgtggatgttcattagggttgtcaaagtacccctattcaggagaaaaaaaaaagttatttctccctcctgactcttttcccttttttcttcctttcttcctttttttcttttgtttcattccagaacgtgtactgtttgccaatatgtcagtgtatatgtctctatataatgctgattgtaacttaattttcctctgtagctaacagttttatccaaggaaatttaagaacaaaccaagcacaataatgtcttagttcattcaggctgctataacaaaaataccattgactagatggcttatacaacaaacatttatttcttgcanttctgaaagctaggaagtccatgatcaaggtgtaaacagattcagtgtctgggaagaacctgcttcctgggtcatagatgatcttttttctatgtctttacatggctgaagacaaaagaaagctctctggggtctcttttgtaacagcattaatcccacttagaaggatctatccccatgaaatactcacctcctaataccatctcattgggggttagaatttcaacatatgatttttgcagggacacaaacattcagtttatagcaaatgattaggtggtgtctctctacccatgttgatgtattcttagaagaaagatggaaataatc

SEQ ID NO: 3658 - DNA, 661 bp, Homo sapiens
  misc_feature [331]..[331]: Chromosome 8, SNP identification no. = rs673380
  misc_feature [331]..[331]: allele = g, in linkage disequilibrium with rs17667338, respectively
  misc_feature [331]..[331]: n is a, t, c or g
gctgctttctggaacatattgcctcatccttacttgtggttctcaaatcacatcaaaatcatgtgtagtacatgttgtaaagctagatgctagtgttaccaaatttgaatctcctaagtgtaggaaattcctcttatattaaggtaccaggagattttgaattttttatctaggttagggaaccagtgtctagcttggtgattagattttggcctgcctgggtgaggcgcataggggccagttttccccgtatcttcgtattctgccaattaggactggtattcttagagccttttgtctttttgtgacctactgtgctagtttccttttntattccagaattggcactttcctgtgatatttcactttggaagatcccctccttcaatggaagaactttttcttcctgcaagggtataagctatcactttaatcataacagaatattaacctaagactataaagacaccaaaaatgcacactgatatgtatatgtgtgtattatataggtaagaaaggataagttccttatattctctaatacagtggttcttacactttgtcatgcatcagaatcatctggaggtactcactttgctgggcaaacccccagagtttccaagtaatgaggtcagggtgagatctaaaattttatatttcc

SEQ ID NO: 3659 - DNA, 661 bp, Homo sapiens
  misc_feature [331]..[331]: Chromosome 8, SNP identification no. = rs6993960
  misc_feature [331]..[331]: allele = t, in linkage disequilibrium with rs17667338, respectively
  misc_feature [331]..[331]: n is a, t, c or g
cagagtttcaaaaagatattatcacttccatgttcatttcagcactatttataaaagccaagatatggaaacaacccaaatctctatcaatgaatggttttttaagtggtatataatataaaagaaattgttcacttttaaaaaagaaagaaatcctaaatttgtgacaatgtaaatgaaccatgaagatattacgttgattcaaaagagtcagtcacaaaaattaaattgtgtgattctacatatatgaggtatctaaaatagtcaaacacaaagaaacaaagaatgaaattgaggttgctgcggctgggggaatggaggaatgggaagntgttaatcaagagataaaattttacttgtgcactatgtgttaagttctagagatttgctgtataacattatgcctatagttaacaatacttcatcatgcacttaaaaatcgaagacagcagatctcatgttaagtattattaccacaatagaaataaacaaaagaaaataaatataaaacagaaattgtatacttttcaaaaaaagtttaattttaaaagcaaaatggttatagagttttgctcttttattctatggtggaaaatctttctataaaattttcagagcttttaaaagtattttgtaatatttgacattgcctgaaatatat

SEQ ID NO: 3660 - DNA, 661 bp, Homo sapiens
  misc_feature [331]..[331]: Chromosome 8, SNP identification no. = rs3847136
  misc_feature [331]..[331]: allele = a, a, in linkage disequilibrium with rs4871788, rs7014346, respectively
  misc_feature [331]..[331]: n is a, t, c or g
atgcatatccaagggcagaatctaatttcaattccaggacgtttcatgaaacagaatgcaaagcaacaattatctgctaaatggaaaattaaaggcataaataaagtcaaagctcaaaccagtgaggcaaaaatcacacgggctccaatttccttttgctgcttgtagctgcaagtttgaaaggaaggacacatggggatagtaaaaatatgagagcaatggaccacgtttaatcgatagtgaaggctctgatcccacaaatgctccccttcccactattagcccttccccacctactgccaaaacccagcaagctgaatggagcaagacntctgagaaagaggcccctgttctctccataggaacttcactttcctataaatgtgctccagcactgagtaagttctggtaaaaaagagctttatttccccagactccttgttcctccacttctgccaaaatacatttcttaagtattccaacctgaaacacacacatgcacacacatacacacacatatgctgccaatttcttggtattttgtcaatactgactttgccccttttctaaatcttcatctccaattaaggcttcctgtttgatagacaagtggtgacacatgacacagaataagcccagtggaagactttgtttcccacgg

SEQ ID NO: 3661 - DNA, 661 bp, Homo sapiens
  misc_feature [331]..[331]: Chromosome 8, SNP identification no. = rs10505477
  misc_feature [331]..[331]: allele = a, in linkage disequilibrium with rs4871788, respectively
  misc_feature [331]..[331]: n is a, t, c or g
agatttatggattagaaaagtcattgttgcagctgttttgagagtggaattgaagtggtgaactttgcagtggtccaagtaaaagaggcagtggggatcaagaggagggaaaagattggaaacacacttgtggggaagaatttaaaggagagcagggaagacagagggtgagggaggggtggaagtcacaagcattggttgtaaatcatggcccaaagcatttgacacttgacccagtgtcttacatatggacccgtgggaaacaaagtcttccactgggcttattctgtgtcatgtgtcaccacttgtctatcaaacaggaagccttaantggagatgaagatttagaaaaggggcaaagtcagtattgacaaaataccaagaaattggcagcatatgtgtgtgtatgtgtgtgcatgtgtgtgtttcaggttggaatacttaagaaatgtattttggcagaagtggaggaacaaggagtctggggaaataaagctcttttttaccagaacttactcagtgctggagcacatttataggaaagtgaagttcctatggagagaacaggggcctctttctcagatgtcttgctccattcagcttgctgggttttggcagtaggtggggaagggctaatagtgggaaggggagcatttgtggg

SEQ ID NO: 3662 - DNA, 661 bp, Homo sapiens
  misc_feature [331]..[331]: Chromosome 8, SNP identification no. = rs10505476
  misc_feature [331]..[331]: allele = t, in linkage disequilibrium with rs4871788, respectively
  misc_feature [331]..[331]: n is a, t, c or g
cctcagaatagcttggaatggctaagtggtttttttgccaggtggtggaggcaggttcacattcacagcaaacattcacaggcacttcctatgtgccaatcagtgagttaagtatacagaaaagtatataatgctctcctgcccttgaggttgatacaatctttgccttagaaaggaaacagacaagcaggcagtgatttctcaaagtgatacaagtcatggtcatttcataaaaccatggtgggtggggatacagaagacagaacctgcttggaacatgtgtgtgcatgcgtgtgtctgtcttaggcaaagcttcacagaggacacaccnaggaggctgaatctggaaaggtgaatgagagtttgatagaagaggaatagaagcgtttctggcaaagagaacgctgtgagaaggcagtgttgtaagagggcaggaagtgtttgggaaagagaagtttagtttggctgtgcgtccagaatgatggctggcacacagtggatgcttcatggttttgaatgaatgagtgaaaagataaatgaatgacatcagtggtggaggaggttaagggggattattgatgaaggtcctggtaggcatggccatagagggtggtctttatcttgtaggcaatgggagcccattgtgttttctgaacaaagg

SEQ ID NO: 3663 - DNA, 661 bp, Homo sapiens
  misc_feature [331]..[331]: Chromosome 8, SNP identification no. = rs11985829
  misc_feature [331]..[331]: allele = t, in linkage disequilibrium with rs7014346, respectively
  misc_feature [331]..[331]: n is a, t, c or g
caagtttttcataacccttaaactcgtctttccctttcaggctttcctgctatttcttaccttgaacgtccttctctttcacctgttcattcttcatgatggagctcaagtctccttcataaaggcaccaaagaccactcctcaccgatttgtctcaccactggagcctgtgcatgcccagatcccagcatttcccacttgtggtttacagtccgtttctcctagtaagtccagagtgctgtgacttcagggacagtgtctatgcacctagcatagcttttctgaagtccttccctgggctaggcattgcggcagcttctgaggataccangtagctcaagcatagtccctgccctcaagaagcagacaagaaactaacctgaaagtctatggtgatgataaatgtgatatcatatggtccctgccctcaagaagcagacaagaaactaatctcaaggtctatggtgatgataaatgtggcattgttcttggcaactacaaggaaatcagtgaaaaggggaggacagagagaagaaagcccagaaaaaggaaagaaagcaagaaaaagaaggagggaggaaagaaagaaagaagtgaattgaggccatggagttacttcagttgtcaaatgttccactggaatatatttacaactatgaaa

SEQ ID NO: 3664 - DNA, 661 bp, Homo sapiens
  misc_feature [331]..[331]: Chromosome 8, SNP identification no. = rs10808555
  misc_feature [331]..[331]: allele = g, in linkage disequilibrium with rs7014346, respectively
  misc_feature [331]..[331]: n is a, t, c or g
ttctgaagtccttccctgggctaggcattgcggcagcttctgaggataccatgtagctcaagcatagtccctgccctcaagaagcagacaagaaactaacctgaaagtctatggtgatgataaatgtgatatcatatggtccctgccctcaagaagcagacaagaaactaatctcaaggtctatggtgatgataaatgtggcattgttcttggcaactacaaggaaatcagtgaaaaggggaggacagagagaagaaagcccagaaaaaggaaagaaagcaagaaaaagaaggagggaggaaagaaagaaagaagtgaattgaggccatgnagttacttcagttgtcaaatgttccactggaatatatttacaactatgaaaaggaatcactttcactattccagacacatttttgctgattcctttagcacagtgtttcccaaagagtggccaccatgccccaggaggcatttgaccatagtgtgcagaaggatattttaaattgtaataattgcgtacttcaacgtgtgttagtactaagtttctagcctttcaaacctatcttttcatggatattattgctttgtttagagtgagtgtaaacaaattacaagtgagtaaaactgaggggttctgatttcatgtcttgcctagaaaaga

SEQ ID NO: 3665 - DNA, 661 bp, Homo sapiens
  misc_feature [331]..[331]: Chromosome 8, SNP identification no. = rs10808556
  misc_feature [331]..[331]: allele = c, c, in linkage disequilibrium with rs4871788, rs7014346, respectively
  misc_feature [331]..[331]: n is a, t, c or g
gacaccaagagggaggtatcaacagagactccccaagagctaagaggaaaccaccttggactggaagtcaagagccaaaattctagactctactctgtaattaactacctatttgaatttggaaaaatcaccatcaactttcccagcctcgttctctgcatctgggaaatgaaggcgtcgtccaaatgattacaagcttcttttcctgctcttattgcatgattccacttccacagccctccagcattttttagcagctgcatcgctccatagagcctgcagagggcactagactgggaattagaaaacctgatttcccttccagctccanctctgaccaattgcctgaccctggtcaaattgcttaacctcttcctatctcagctccctatccataaaacagagggacgaataaactctcctcctaccactaagaggtgtagccagagttaataccctcatcgtcctttgagctcagcagatgaaaggcactgagaaaagtacaaagaatttttatgtgctattgactttattttattttatgtgggggagggagccggccccagctggaaagctgctttctctgaatcaaagggcaggaacccagcaagtttctcaggattggggccttagactgggctgtgtatacagacagtgccag

SEQ ID NO: 3666 - DNA, 661 bp, Homo sapiens
  misc_feature [331]..[331]: Chromosome 8, SNP identification no. = rs6983267
  misc_feature [331]..[331]: allele = g, in linkage disequilibrium with rs4871788, respectively
  misc_feature [331]..[331]: n is a, t, c or g
catctgggaaatgaaggcgtcgtccaaatgattacaagcttcttttcctgctcttattgcatgattccacttccacagccctccagcattttttagcagctgcatcgctccatagagcctgcagagggcactagactgggaattagaaaacctgatttcccttccagctccacctctgaccaattgcctgaccctggtcaaattgcttaacctcttcctatctcagctccctatccataaaacagagggacgaataaactctcctcctaccactaagaggtgtagccagagttaataccctcatcgtcctttgagctcagcagatgaaagncactgagaaaagtacaaagaatttttatgtgctattgactttattttattttatgtgggggagggagccggccccagctggaaagctgctttctctgaatcaaagggcaggaacccagcaagtttctcaggattggggccttagactgggctgtgtatacagacagtgccagccaaccccacagttcagtttcctttaacctggtgctccaggcaataactgtgcaactctgcaatttaacaatgtgttctttgtcccacaactgttctcgtttctcaactgcccaggtaatatgtttgggcctgtaggaagagtcaaatagttaataag

SEQ ID NO: 3667 - DNA, 661 bp, Homo sapiens
  misc_feature [331]..[331]: Chromosome 8, SNP identification no. = rs3847137
  misc_feature [331]..[331]: allele = c, c, in linkage disequilibrium with rs4871788, rs7014346, respectively
  misc_feature [331]..[331]: n is a, t, c or g
taagactttgtggaggcttttaccagccaatcttcagaataaaacccccaaccagagccagatgagatcaacctaggctgtaatgaactaacaacttccagagtgagaatgcctctcttgttggctccagtagacagcaggaaagcaagtcagacatgaggaacgagaaagccactgagagaagattttgctacttggaccatttcctggaatattactgtcaaataagtaaaagcctgataacgttttcaggtgcgtgtgtgtatacagttttagagaaagtcttattaaagaatatcagattcaagactcatacaagaaatgccttccntttggcgagacaatacttgcagccggggggtgctttcactgttggaggtgtctgcaggtagtgcacctgtccagtgggaatgctctgtcaagatgcactagtgtcttctgggctgatgttgcccacggctctcttcccagagtagaacaggggaagctgaacacctgcaggatatcttgggaatgacattcaaaaagctacagctgtcccagctgagccaggagcctggcaagcacttggagcacacattatttatgtaagcaatctctgtcagcgccacatctggggataaaggatcaaaccccaacaaatttaattaaggctcttcac

SEQ ID NO: 3668 - DNA, 661 bp, Homo sapiens
  misc_feature [331]..[331]: Chromosome 8, SNP identification no. = rs7013278
  misc_feature [331]..[331]: allele = t, t, t, in linkage disequilibrium with rs4871788, rs7014346, rs7842552, respectively
  misc_feature [331]..[331]: n is a, t, c or g
tatacacacacgcacctgaaaacgttatcaggcttttacttatttgacagtaatattccaggaaatggtccaagtagcaaaatcttctctcagtggctttctcgttcctcatgtctgacttgctttcctgctgtctactggagccaacaagagaggcattctcactctggaagttgttagttcattacagcctaggttgatctcatctggctctggttgggggttttattctgaagattggctggtaaaagcctccacaaagtcttagctagaacattcatagccctgtgttgacttccgcctcaactctggcttgaacttagctgacggncctatcagtttgctcaaaggagcttttttgctgcaggcaacagaaaggagtggaaagaacacactcattggaacccaggagatccaggctcgcctctggctctaggacttgctcatcatgtgatatcagatacatgacttcatcgctgagtctcagtttccttatctatgaaccggggatattcataccttcttcacaggacaagagaggcacatacaagttcatatctgtccctctatttcaagtgattctcccacatcagaaccagtttggcttccccggcctggtcttctttcaaaggatgcacaaggccatttacaactggcctga

SEQ ID NO: 3669 - DNA, 661 bp, Homo sapiens
  misc_feature [331]..[331]: Chromosome 8, SNP identification no. = rs10505474
  misc_feature [331]..[331]: allele = t, t, in linkage disequilibrium with rs4871788, rs7014346, respectively
  misc_feature [331]..[331]: n is a, t, c or g
tttaatgaccaaatcacttttactatttaattctgttcttctgggggtgagttaaatgataaaatatcttaagaaggaaatcttattgaacaaatattatcttgacaaaacatttgtcacaaataggtgagtttatcctggcttcttagggaaaggaggcttggaatatatttaattgtgttaagataagctattttgcttcttttccctttctactgtattcccatttgtaaatttggtccccaaaccatgcagcttttacattcaaagtatacatatttcactctcctttttcccccttttgctagtggcctaaatcaggatcctatcntctctcattctgatctatagaaaaactttttaattaatctctcagcaaccaccatctccctcctctaattcatactccataattcaccaagtattcttctaaaccatagaaacacttatgccacacaccttttctgaaattggcattctagagtttataataagtccctctattcctcaaggcccctgtccctggaatgctgctgtcctagaaagaatcccagcatttttccgtcactaaatagagggtgcatctttatcctgcaacatcttattttaggatagaagaaaacagccccacatagtggggtaagaaacagtgacatgatgc

SEQ ID NO: 3670 - DNA, 661 bp, Homo sapiens
  misc_feature [331]..[331]: Chromosome 8, SNP identification no. = rs2060776
  misc_feature [331]..[331]: allele = g, g, in linkage disequilibrium with rs4871788, rs7014346, respectively
  misc_feature [331]..[331]: n is a, t, c or g
tacctcaaggctagaagggacaaatggagagaatattcactggaacctggagtcagagagccaggtagagaaggaactgagagctttggccaaggttaccctgaagggagggagcagttgattctaatggagaactaacccagaggctcatcaacaggagagtggaaaataaatggtgatatatccatataatgagtagtatacaacaataaagggaataaattactcaggcatgctgcaatatgggtaaatcttaaaaataaattaagccaatgaaaccagacccagatatatactgtataattcaatttccatgaaattcaagaccaancaaactaatctctgttgatagaaattatattagttatctcttgatgtggagactgagttggaaggaccattgaggacacttccgggatggtggaaatgctttatatttttgactcagttgtggttgcatggatatatatatatatatggatatatatatatatggatatatatatatatatggatatatatatatatggatatatatatatatatggatatatatatatatggatatatatatatatatggatatatatatatatatatggatatatatatatatatatatatatacctgcaagagaaaaatcatcaagtggcatctata

SEQ ID NO: 3671 - DNA, 661 bp, Homo sapiens
  misc_feature [331]..[331]: Chromosome 8, SNP identification no. = rs4871788
  misc_feature [331]..[331]: allele = g, in linkage disequilibrium with rs7014346, respectively
  misc_feature [331]..[331]: n is a, t, c or g
tagctccactaggggatatcagagtgattgcttcaagtggagaaagatgggggaaaaaatttgatcagtccagagtgcttctctagaattcaggccactgagggtgagactatatggtgtagcagaatgagcactcgactctgagttaggaaataagggaggctattactagtgatctatatccatcactttccttctgtgagcctttctgtcttgtttctaaagcagtggttctcaagcctggcttcacattagaatcacctgggaagattttcaagctcccagtaccaaaactatgcatcaaaccattatatcacaaactctgagggcnaaaccaaatatccacagtttttaaggcccttcaggagctttcaatttgcaggcatagttgaaaaccttgaaaatatctggagacaggtagctgaaattagtgatccttaaggtagtaatgcatgactttcaagaacgtgaatccttcaggtgcaaatcatctgaggatcttgttacaatgcaggttctgactcagtagttctgacttagtaggtgagagatcctgcagttttataaaagcaaccagtggatagagccgctgctggtcctgggacaacattttgagtaacaggagcaaaaaggtaccttttctctcaaaaatttgaaaagc

SEQ ID NO: 3672 - DNA, 661 bp, Homo sapiens
  misc_feature [331]..[331]: Chromosome 8, SNP identification no. = rs7837328
  misc_feature [331]..[331]: allele = a, a, in linkage disequilibrium with rs4871788, rs7014346, respectively
  misc_feature [331]..[331]: n is a, t, c or g
ggtggaccatgggaggaaagtgactagagacgcaactgaagaaataattactgtactgagcctcctagaacaggctaaggaccctgagttttaaaacaagggcaatggcaaagatacggccacaccatcatgacagtagagagagggaacacttaatattacccagagctggcagggaagacaaccagaagagcaacatttgagctgattcttaaaaaaaaaaaaaaaaaaaatagagatacacgagaaatccaaattaggatagaattccagaagaagggagtagcatgtgcaaaaaaaaaaaaaaaaaaggaagcaaaaattagcaaanagaaagtactaagtgtatgtcagagagtagggaaagtgagggtcttaagaggccttgagaagtccaacctcaacaactacagacaacaaaagacaaaacccatggtgacataccttttcttattttaatagataacagacattattattaagaacatcttaagaggtagcttccaaacagggtcactgcctacagttatacagggggcacactacccaattccaaggcagcggtttgcatcaatataatgtaaatggcatcccatggagcagtgcaatatgccagccctacccccatttctttcctttttaagttttttcattaaagttc

SEQ ID NO: 3673 - DNA, 661 bp, Homo sapiens
  misc_feature [331]..[331]: Chromosome 8, SNP identification no. = rs7837626
  misc_feature [331]..[331]: allele = a, a, in linkage disequilibrium with rs4871788, rs7014346, respectively
  misc_feature [331]..[331]: n is a, t, c or g
aaaaaaaaaaaaaaaaaaatagagatacacgagaaatccaaattaggatagaattccagaagaagggagtagcatgtgcaaaaaaaaaaaaaaaaaaggaagcaaaaattagcaaaaagaaagtactaagtgtatgtcagagagtagggaaagtgagggtcttaagaggccttgagaagtccaacctcaacaactacagacaacaaaagacaaaacccatggtgacataccttttcttattttaatagataacagacattattattaagaacatcttaagaggtagcttccaaacagggtcactgcctacagttatacagggggcacactncccaattccaaggcagcggtttgcatcaatataatgtaaatggcatcccatggagcagtgcaatatgccagccctacccccatttctttcctttttaagttttttcattaaagttctttctcttctggacaagaaaaccctatgataatggaatcttcaaactgaaagcatctataaaatgaaccccagattcctggggctttagactttcgttaaccaaataagatgaggaattatgggtgtctgatgtgccaggtactattccaatacttaaaatatatcatcccgtatttctcacagtagaaccatgaagtagagacattactgcat

SEQ ID NO: 3674 - DNA, 661 bp, Homo sapiens
  misc_feature [331]..[331]: Chromosome 8, SNP identification no. = rs7837644
  misc_feature [331]..[331]: allele = a, a, in linkage disequilibrium with rs4871788, rs7014346, respectively
  misc_feature [331]..[331]: n is a, t, c or g
agaagaagggagtagcatgtgcaaaaaaaaaaaaaaaaaaggaagcaaaaattagcaaaaagaaagtactaagtgtatgtcagagagtagggaaagtgagggtcttaagaggccttgagaagtccaacctcaacaactacagacaacaaaagacaaaacccatggtgacataccttttcttattttaatagataacagacattattattaagaacatcttaagaggtagcttccaaacagggtcactgcctacagttatacagggggcacactacccaattccaaggcagcggtttgcatcaatataatgtaaatggcatcccatggagcngtgcaatatgccagccctacccccatttctttcctttttaagttttttcattaaagttctttctcttctggacaagaaaaccctatgataatggaatcttcaaactgaaagcatctataaaatgaaccccagattcctggggctttagactttcgttaaccaaataagatgaggaattatgggtgtctgatgtgccaggtactattccaatacttaaaatatatcatcccgtatttctcacagtagaaccatgaagtagagacattactgcattttcctatgagaaaatgggactgagatggttaaggtgggatagtataggtagaaact

SEQ ID NO: 3675 - DNA, 661 bp, Homo sapiens
  misc_feature [331]..[331]: Chromosome 8, SNP identification no. = rs10956368
  misc_feature [331]..[331]: allele = t, t, in linkage disequilibrium with rs4871788, rs7014346, respectively
  misc_feature [331]..[331]: n is a, t, c or g
cagttatacagggggcacactacccaattccaaggcagcggtttgcatcaatataatgtaaatggcatcccatggagcagtgcaatatgccagccctacccccatttctttcctttttaagttttttcattaaagttctttctcttctggacaagaaaaccctatgataatggaatcttcaaactgaaagcatctataaaatgaaccccagattcctggggctttagactttcgttaaccaaataagatgaggaattatgggtgtctgatgtgccaggtactattccaatacttaaaatatatcatcccgtatttctcacagtagaaccangaagtagagacattactgcattttcctatgagaaaatgggactgagatggttaaggtgggatagtataggtagaaactgttagaacaaacatactcagtcttaactaatttctagatccatgctttgtccgctcctttgttattccttgaagatgttaggggaaattcattagtccattgcaataatgtacaactcctgtggaaataacttacacgcctatgattagaacacataggttcagacatcacaaggctttgatgtgcctgaaattctatcaatttacggggcaatgctagttatctcttggtgatttgtgcctctgtttggca

SEQ ID NO: 3676 - DNA, 661 bp, Homo sapiens
  misc_feature [331]..[331]: Chromosome 8, SNP identification no. = rs10956369
  misc_feature [331]..[331]: allele = t, t, in linkage disequilibrium with rs4871788, rs7014346, respectively
  misc_feature [331]..[331]: n is a, t, c or g
taatggaatcttcaaactgaaagcatctataaaatgaaccccagattcctggggctttagactttcgttaaccaaataagatgaggaattatgggtgtctgatgtgccaggtactattccaatacttaaaatatatcatcccgtatttctcacagtagaaccatgaagtagagacattactgcattttcctatgagaaaatgggactgagatggttaaggtgggatagtataggtagaaactgttagaacaaacatactcagtcttaactaatttctagatccatgctttgtccgctcctttgttattccttgaagatgttaggggaaatncattagtccattgcaataatgtacaactcctgtggaaataacttacacgcctatgattagaacacataggttcagacatcacaaggctttgatgtgcctgaaattctatcaatttacggggcaatgctagttatctcttggtgatttgtgcctctgtttggcagtagtctctgccttagatcccttggaaagagagaaactaattccttaaaattttgtttatttgccatcctatcaaaatatgactacctaggggaagaataattaagtggatcattaatggtgtatttaccacatcctgactggaatcataattatttgcttacctgg

SEQ ID NO: 3677 - DNA, 661 bp, Homo sapiens
  misc_feature [331]..[331]: Chromosome 8, SNP identification no. = rs7014346
  misc_feature [331]..[331]: allele = a, a, in linkage disequilibrium with rs4871788, rs7842552, respectively
  misc_feature [331]..[331]: n is a, t, c or g
tcagaccaccacccaaataacccaagagtcttctttgatttttttctctgtctcaacatctccaaacccctctaccccacctagccacttccagtcttatcttttatggtgagaaccagcttcatgtaacagaaactctaaaaaaaatcaatgatttaaataacttgggtatataaatatctctctcatactagaagatcagaggtgggaagtctgagcatgatataatggtcatcaggggtccaagcttcttcattctgcctcaccatctcgcttgcagcttctgcctaatgttgacttacagttcaagatggcttctggagtgctaccnttacatccatgttgtaggctagaaggaaaagggcaatggcctgaagaggaagggagagttcctgttaactcagcttcctttaaacagcctccccaaaagtttcacgctgtatttttgctgattctcattggtcacaacttagtgccatggaagactagtaaatatagtcttttagctggatggcctgctatcttatataaaatgaggttaggttactaagacagaaagggagagcagatcttgggaggcagctagctgtttttgccatcccaagtgttgtgatttctacctgctttcaatttaacctatttgccagtttctctgcatcca

SEQ ID NO: 3678 - DNA, 661 bp, Homo sapiens
  POU5F1P1
  misc_feature [331]..[331]: Chromosome 8, SNP identification no. = rs871135
  misc_feature [331]..[331]: allele = g, g, in linkage disequilibrium with rs4871788, rs7014346, respectively
  misc_feature [331]..[331]: n is a, t, c or g
actggtcaaacacattttgtgcttcttaaaaaaaggtggtacacacacacacacacacacacaacacccgatataatacaatattttcaaatgacactagaaatattttagtcaggtctaaaggaacagaagttaatgataaaatgataaacaataaataatagctactgtttcatgagaaaattacacacatcttacttgacttaaacctcacaacagaattgagcagaaagttattaccctgagaaaggggacttaaggttggcaggataacaagtgggagaatctagaggtaaagtcatatctatcttattggaaacactcaagaacntcaaataagcatgagaatttgagcaagactgaaggagaacgtttaagttccctttccaactcatatcccaattctggaatctaatttctgtaacaagtaactatattccttactacagaagtaaagatggccccatggagaaactggcagcatggcatgatggaaatggaatagaatcaggaattgttttgtacctgtgtgtgtgtgactttggtgttctgactcagacacatatttgagaggtagagaggggagaagagggttgccacattatgtaacagaaaggagcccactgcttaaacacttaccttgtgccagacattgcactag

SEQ ID NO: 3679 - DNA, 661 bp, Homo sapiens
  misc_feature [331]..[331]: Chromosome 8, SNP identification no. = rs7842552
  misc_feature [331]..[331]: allele = g, in linkage disequilibrium with rs7014346, respectively
  misc_feature [331]..[331]: n is a, t, c or g
gacacctgtgaactcaatttaccctagaaaaatgtttcagtcacacttaaaataaaaagggcatcaattagaataagaaggacactttgttgcctaggaggactgaacttttttggacctggggcaccttatcagcttcatttttagctctagtataatcaaaaggtcaggatctccactggaccttagaaattttttatttttcgataagattttctgaatgcctgccatgtgtgaagggaaatgcctggacttctatgcatatgtatttcattgtctccccacatctacccaggaagacaggcacagtgagccttgcatgttgtagatnaggaagctaagtctcaaagacagagaaggaatttctcaaggtcacactgtaagtaaaaggcaaaggagggattagaaccctggatcctctttattacaccaagcctgcctcacaaggatgccaatctctcatcacttactgggaaagacccactcctcccattcatgataaggtaatgctatccaataaaaaccccaaagcaggcataaaatatgaagtagcgaaactcaggcaggcagaaagcagagtggtttagacatggctgctgtctgcagcagggagaagttcctggcaacatgaccctgaaaataacaatgagtgactgaagct

SEQ ID NO: 3680 - DNA, 661 bp, Homo sapiens
  misc_feature [331]..[331]: Chromosome 8, SNP identification no. = rs2976593
  misc_feature [331]..[331]: allele = c, in linkage disequilibrium with rs6980682, respectively
  misc_feature [331]..[331]: n is a, t, c or g
caagcctgaaaagtgcaggatccatcttttgctggaaagaaaacttctccagaccctcagcactgaacagctgaggtgaagaaatcttctacaatcagggcataaacgcttagagggaaggtttattgtctcttctttacagatggggaaactgaggcccagagaagggaaacccttgcctagtgtcaccatagcagaatagggatgtaaactcagtctcctgacagccagttgtgggctttatcctccccagcttagtctgcccgggctgccataaacaaataccacagactgggtggcttaaagaacaggcactcatttctcacaagtntgggggctgggaagtccaagatcaaggcactggcagatctggtgtctgatgagggctcgcgtctcagtttgcatgtggccactttcttgctgtgtcctcacatgaaggagacagagattttgtgtctcttcctcttcttaaaaggacagttacatcacaagggtcccagcctcatggcctcctctaatcctaattgcctctcaaacgcctcgcctccaaacaccgtcacattgagattcaggctttaacctacaaatctggaggaggcacattcagtccattgcactccccaagactgggttataccttgtgcgtctttggttcttcacc

SEQ ID NO: 3681 - DNA, 661 bp, Homo sapiens
  misc_feature [331]..[331]: Chromosome 8, SNP identification no. = rs2976594
  misc_feature [331]..[331]: allele = t, in linkage disequilibrium with rs6980682, respectively
  misc_feature [331]..[331]: n is a, t, c or g
gatggggaaactgaggcccagagaagggaaacccttgcctagtgtcaccatagcagaatagggatgtaaactcagtctcctgacagccagttgtgggctttatcctccccagcttagtctgcccgggctgccataaacaaataccacagactgggtggcttaaagaacaggcactcatttctcacaagtttgggggctgggaagtccaagatcaaggcactggcagatctggtgtctgatgagggctcgcgtctcagtttgcatgtggccactttcttgctgtgtcctcacatgaaggagacagagattttgtgtctcttcctcttcttanaaggacagttacatcacaagggtcccagcctcatggcctcctctaatcctaattgcctctcaaacgcctcgcctccaaacaccgtcacattgagattcaggctttaacctacaaatctggaggaggcacattcagtccattgcactccccaagactgggttataccttgtgcgtctttggttcttcacccaactgcaaaatctccatcccacccctcccactctattgtcaatatcagtctgtctcctccctgggtcctgagcacactcctcaggggctcaggaacctcttcatctctctctgcaactctggagctggttcagtgcctgg

SEQ ID NO: 3682 - DNA, 661 bp, Homo sapiens
  misc_feature [331]..[331]: Chromosome 8, SNP identification no. = rs2929955
  misc_feature [331]..[331]: allele = a, in linkage disequilibrium with rs6980682, respectively
  misc_feature [331]..[331]: n is a, t, c or g
cactcatttctcacaagtttgggggctgggaagtccaagatcaaggcactggcagatctggtgtctgatgagggctcgcgtctcagtttgcatgtggccactttcttgctgtgtcctcacatgaaggagacagagattttgtgtctcttcctcttcttaaaaggacagttacatcacaagggtcccagcctcatggcctcctctaatcctaattgcctctcaaacgcctcgcctccaaacaccgtcacattgagattcaggctttaacctacaaatctggaggaggcacattcagtccattgcactccccaagactgggttataccttgtncgtctttggttcttcacccaactgcaaaatctccatcccacccctcccactctattgtcaatatcagtctgtctcctccctgggtcctgagcacactcctcaggggctcaggaacctcttcatctctctctgcaactctggagctggttcagtgcctggcctaaggcgggtgctaagggaatatttattaaatctatttaactttctctcttaatgcattccacatcctgcttccagagttatctttctgtttgtgtacaggagggtaaggtaggtagagggttcagcccatgcaaaggcctcatggcaggagtgttcatagtcagtact

SEQ ID NO: 3683 - DNA, 661 bp, Homo sapiens
  misc_feature [331]..[331]: Chromosome 8, SNP identification no. = rs2976536
  misc_feature [331]..[331]: allele = a, in linkage disequilibrium with rs6980682, respectively
  misc_feature [331]..[331]: n is a, t, c or g
gtctgatgagggctcgcgtctcagtttgcatgtggccactttcttgctgtgtcctcacatgaaggagacagagattttgtgtctcttcctcttcttaaaaggacagttacatcacaagggtcccagcctcatggcctcctctaatcctaattgcctctcaaacgcctcgcctccaaacaccgtcacattgagattcaggctttaacctacaaatctggaggaggcacattcagtccattgcactccccaagactgggttataccttgtgcgtctttggttcttcacccaactgcaaaatctccatcccacccctcccactctattgtcaanatcagtctgtctcctccctgggtcctgagcacactcctcaggggctcaggaacctcttcatctctctctgcaactctggagctggttcagtgcctggcctaaggcgggtgctaagggaatatttattaaatctatttaactttctctcttaatgcattccacatcctgcttccagagttatctttctgtttgtgtacaggagggtaaggtaggtagagggttcagcccatgcaaaggcctcatggcaggagtgttcatagtcagtactaggaacttggaggaggccagtgtgtagctggagcagagaccaaagggaaagtctcagggcag

SEQ ID NO: 3684 - DNA, 661 bp, Homo sapiens
  misc_feature [331]..[331]: Chromosome 8, SNP identification no. = rs2976537
  misc_feature [331]..[331]: allele = c, in linkage disequilibrium with rs6980682, respectively
  misc_feature [331]..[331]: n is a, t, c or g
tcctcttcttaaaaggacagttacatcacaagggtcccagcctcatggcctcctctaatcctaattgcctctcaaacgcctcgcctccaaacaccgtcacattgagattcaggctttaacctacaaatctggaggaggcacattcagtccattgcactccccaagactgggttataccttgtgcgtctttggttcttcacccaactgcaaaatctccatcccacccctcccactctattgtcaatatcagtctgtctcctccctgggtcctgagcacactcctcaggggctcaggaacctcttcatctctctctgcaactctggagctggntcagtgcctggcctaaggcgggtgctaagggaatatttattaaatctatttaactttctctcttaatgcattccacatcctgcttccagagttatctttctgtttgtgtacaggagggtaaggtaggtagagggttcagcccatgcaaaggcctcatggcaggagtgttcatagtcagtactaggaacttggaggaggccagtgtgtagctggagcagagaccaaagggaaagtctcagggcagtgtgttagtccactcaggttgctgtaacaaagtaccacagactgggggcttaagcaacagacacttactttctcacagtcctggag

SEQ ID NO: 3685 - DNA, 661 bp, Homo sapiens
  misc_feature [331]..[331]: Chromosome 8, SNP identification no. = rs2976538
  misc_feature [331]..[331]: allele = t, in linkage disequilibrium with rs6980682, respectively
  misc_feature [331]..[331]: n is a, t, c or g
gttacatcacaagggtcccagcctcatggcctcctctaatcctaattgcctctcaaacgcctcgcctccaaacaccgtcacattgagattcaggctttaacctacaaatctggaggaggcacattcagtccattgcactccccaagactgggttataccttgtgcgtctttggttcttcacccaactgcaaaatctccatcccacccctcccactctattgtcaatatcagtctgtctcctccctgggtcctgagcacactcctcaggggctcaggaacctcttcatctctctctgcaactctggagctggttcagtgcctggcctaaggngggtgctaagggaatatttattaaatctatttaactttctctcttaatgcattccacatcctgcttccagagttatctttctgtttgtgtacaggagggtaaggtaggtagagggttcagcccatgcaaaggcctcatggcaggagtgttcatagtcagtactaggaacttggaggaggccagtgtgtagctggagcagagaccaaagggaaagtctcagggcagtgtgttagtccactcaggttgctgtaacaaagtaccacagactgggggcttaagcaacagacacttactttctcacagtcctggaggctggaagtctgagtccaa

SEQ ID NO: 3686 - DNA, 661 bp, Homo sapiens
  misc_feature [331]..[331]: Chromosome 8, SNP identification no. = rs2976539
  misc_feature [331]..[331]: allele = t, in linkage disequilibrium with rs6980682, respectively
  misc_feature [331]..[331]: n is a, t, c or g
agtcctggaggctggaagtctgagtccaaggtgtcagcaggactggtttcttctgagacctgtctctttggcttgccatcttctccctgtgccttgatggggtcttccctctgtttgtgtgtgtcccagtctcttcttataaggacaacagtcatattgaattaggtcccacactagcagccttattttatcttaattacctctttaaagactctctctctaaatgcagtcacattctgaggtcctggggtttaggacttcaacataggagtttctgggagacacagtttatcccataacaggcagggccttggaaggctttgcagagccncagggagtttggaccttattccaagttgctgcgagaccagcagaagcctttcagccaaaagataaagtaccagatttgcttttgaaaaagatccccatggctgttgtgtggtgattcagcttccagggggttaagggttgaaacaaagaagaggcccttggagtggcccagtggacagatgatggtagccagaccagggcaggttggggaaggtggggagaagtggctggagcggggtaagtttagagatagaaatgacagtcctgctgacaagtggatggatggaggatttgagagacagaagacataaaggaaaactggattcaaatc

SEQ ID NO: 3687 - DNA, 661 bp, Homo sapiens
  misc_feature [331]..[331]: Chromosome 8, SNP identification no. = rs2976540
  misc_feature [331]..[331]: allele = t, in linkage disequilibrium with rs6980682, respectively
  misc_feature [331]..[331]: n is a, t, c or g
agtccaaggtgtcagcaggactggtttcttctgagacctgtctctttggcttgccatcttctccctgtgccttgatggggtcttccctctgtttgtgtgtgtcccagtctcttcttataaggacaacagtcatattgaattaggtcccacactagcagccttattttatcttaattacctctttaaagactctctctctaaatgcagtcacattctgaggtcctggggtttaggacttcaacataggagtttctgggagacacagtttatcccataacaggcagggccttggaaggctttgcagagccccagggagtttggaccttattcnaagttgctgcgagaccagcagaagcctttcagccaaaagataaagtaccagatttgcttttgaaaaagatccccatggctgttgtgtggtgattcagcttccagggggttaagggttgaaacaaagaagaggcccttggagtggcccagtggacagatgatggtagccagaccagggcaggttggggaaggtggggagaagtggctggagcggggtaagtttagagatagaaatgacagtcctgctgacaagtggatggatggaggatttgagagacagaagacataaaggaaaactggattcaaatcttgctcagcctcatggtggtga

SEQ ID NO: 3688 - DNA, 661 bp, Homo sapiens
  misc_feature [331]..[331]: Chromosome 8, SNP identification no. = rs2929956
  misc_feature [331]..[331]: allele = g, in linkage disequilibrium with rs6980682, respectively
  misc_feature [331]..[331]: n is a, t, c or g
ttccctctgtttgtgtgtgtcccagtctcttcttataaggacaacagtcatattgaattaggtcccacactagcagccttattttatcttaattacctctttaaagactctctctctaaatgcagtcacattctgaggtcctggggtttaggacttcaacataggagtttctgggagacacagtttatcccataacaggcagggccttggaaggctttgcagagccccagggagtttggaccttattccaagttgctgcgagaccagcagaagcctttcagccaaaagataaagtaccagatttgcttttgaaaaagatccccatggctgntgtgtggtgattcagcttccagggggttaagggttgaaacaaagaagaggcccttggagtggcccagtggacagatgatggtagccagaccagggcaggttggggaaggtggggagaagtggctggagcggggtaagtttagagatagaaatgacagtcctgctgacaagtggatggatggaggatttgagagacagaagacataaaggaaaactggattcaaatcttgctcagcctcatggtggtgaggtgactttggggaggtgatttcatgtctctggggtcctgctgagatgtctgtaaaatctgaatcaggaggcacagctcact

SEQ ID NO: 3689 - DNA, 661 bp, Homo sapiens
  misc_feature [331]..[331]: Chromosome 8, SNP identification no. = rs2929957
  misc_feature [331]..[331]: allele = a, in linkage disequilibrium with rs6980682, respectively
  misc_feature [331]..[331]: n is a, t, c or g
tggaggatttgagagacagaagacataaaggaaaactggattcaaatcttgctcagcctcatggtggtgaggtgactttggggaggtgatttcatgtctctggggtcctgctgagatgtctgtaaaatctgaatcaggaggcacagctcactggcagacggggaagtaatgtgtggaaggtgttccgtggaggcgcattcatgggtagtgatgctgagcatctgatatatgccccccaggccagacactgggcccgacatccacgttgggggtgatccactccctgtaggggtatctcccgtgcctcccagggagtccattccaacacctngatgctctgttagattttcagcaatgtccacccttatttctcagttttatctctctgagtcaccaaagcaagtccacatcacacctgtcccttcgggtatgggagccccctgttgtattcctgtcctgtggcaggataccatggagtcagagatttggagatttgtatttgcttttttttttttttttttttttgagacagggtcttgctgtgttgtccaggctacagcctcaacctccggaagtcaagctatcctcccaactcagcctctcgaatagctgggactacaggtgtgcaccactgaacccagctaatttttctattttatgt

SEQ ID NO: 3690 - DNA, 661 bp, Homo sapiens
  misc_feature [331]..[331]: Chromosome 8, SNP identification no. = rs2976541
  misc_feature [331]..[331]: allele = c, in linkage disequilibrium with rs6980682, respectively
  misc_feature [331]..[331]: n is a, t, c or g
tctggggtcctgctgagatgtctgtaaaatctgaatcaggaggcacagctcactggcagacggggaagtaatgtgtggaaggtgttccgtggaggcgcattcatgggtagtgatgctgagcatctgatatatgccccccaggccagacactgggcccgacatccacgttgggggtgatccactccctgtaggggtatctcccgtgcctcccagggagtccattccaacaccttgatgctctgttagattttcagcaatgtccacccttatttctcagttttatctctctgagtcaccaaagcaagtccacatcacacctgtcccttcgggnatgggagccccctgttgtattcctgtcctgtggcaggataccatggagtcagagatttggagatttgtatttgcttttttttttttttttttttttgagacagggtcttgctgtgttgtccaggctacagcctcaacctccggaagtcaagctatcctcccaactcagcctctcgaatagctgggactacaggtgtgcaccactgaacccagctaatttttctattttatgtagagtcgggttttctccatgctgccaaggctggtcttgagcccctgggttcaagcaatcctcccacctcagcttcccaaagtgctgggattctaggcg

SEQ ID NO: 3691 - DNA, 661 bp, Homo sapiens
  misc_feature [331]..[331]: Chromosome 8, SNP identification no. = rs2976543
  misc_feature [331]..[331]: allele = g, in linkage disequilibrium with rs6980682, respectively
  misc_feature [331]..[331]: n is a, t, c or g
aggacccaataaagggcaacaattttaacatcaaaatctatttgtgagaaaataaaagttacttaaactttgtgtgggaggcttcttgcaagctttaggatggggaaaaacagatatggtggatctcacagttttatttcctggaccatgcctatgccaccactgaaggcattggctggatcattggttgtggttattatctttgctggggtcctagtcatctcctccctgagcacactcttcatgtgaccagcatctcagtgcttctgtcccactcttgttaccgtgagttatggctgtcatcgacaccaccctacagcccttcagaacnacttccgcctgacgcccactcacttcctgccgccctcagccaagcatcatggccgcccagaacagactggatggggatcaggctctgcttggcccacgggcttctgctgagaggaaactctctgccaactgggacatactagggaaggggctgaactctaggtggtccctaccccaccttaccaaccacacaccccttatgtcttccattccactctgccttcccttccccccaccccataagaggcccttccagacccactcaccttttacacaggaaatgaccaacaagaccaccaaggcctgcatatcccagagaggggccttagga

SEQ ID NO: 3692 - DNA, 661 bp, Homo sapiens
  misc_feature [331]..[331]: Chromosome 8, SNP identification no. = rs2976544
  misc_feature [331]..[331]: allele = t, in linkage disequilibrium with rs6980682, respectively
  misc_feature [331]..[331]: n is a, t, c or g
cttccagacccactcaccttttacacaggaaatgaccaacaagaccaccaaggcctgcatatcccagagaggggccttaggaggatgcagttggggttccccaacatcatttttgaggcacatgcataaggtgttaaataaaatcaagccacagcagacaaaatttcatcctagttccttgcatccttctagttacatcgaggagcaggcctcagtttcgcaccagggcagatgctaacacctcctctgctctccttttaaccaggaaagagcagcctctgggctgggcacctcccgcagcagctagacctagctggaagttaatatcttntttgcttttgattgtgtttatttttacccaggcctttgatttatgaccagccaaactgcttctccactcagaacagctatacactggttatcctttaatttttatatttcaatttatacaaagggatccattaaattttcaaaaatatagaggaatgagttttacaaagtgcacttggattatgtcaaaaatcataattgtggtacacaaaaaactaccatttgggaaacattacttggacacaaacaggaatccaggcagggagaaagtgaggccctggaaggggcttcctctcagctaatactcagtggaactgggccgatggaggga

SEQ ID NO: 3693 - DNA, 661 bp, Homo sapiens
  misc_feature [331]..[331]: Chromosome 8, SNP identification no. = rs734598
  misc_feature [331]..[331]: allele = g, in linkage disequilibrium with rs6980682, respectively
  misc_feature [331]..[331]: n is a, t, c or g
ccacgtgccaaggagtacctacttggagctagggcctcatttatattaagttgactttgcatacagccttgtgtgttagcccattttagacctcagtatactgaggcccagactggttctataacttgtcaaaactcacccagctgagaagaaaaagaactgaaattcccactcgcattggtctggctccgatgctgacatcagcatcagtatccctgcccttgacctacaatttcagagaagccccagtcttccctgaccccactatctctgcagtaacctgagtttctcacccctaatctccctcctggggctggaagcactgtatttngcagcatctgttaaaaaggccatgtggactcccatgatgacagtgggctcctgggaagaggtgggattggggatctgaaggaggcaggtaggccgggctcctcccatgagagatcctgcctctgggatgttcatacccttggcctcaaggggccagagcagagggaagggtctggactgggaaatcagaaatctctctgctggacacttactcactcccaatgaccttgggcaaactgtagcccctcggtttactcatctgtaaaatggaaaagagcttcaggaattttgaactcgcaggcatcatatggcccacaagcttgtcctggtg

SEQ ID NO: 3694 - DNA, 661 bp, Homo sapiens
  misc_feature [331]..[331]: Chromosome 8, SNP identification no. = rs2976550
  misc_feature [331]..[331]: allele = g, in linkage disequilibrium with rs6980682, respectively
  misc_feature [331]..[331]: n is a, t, c or g
atgcatgtatggaaaggaaaactcttcctgttaatatacaaagtgaatctgtggccacggctgcactcctcattttcatggtctgctgcctgtcccgggaggctgtggctctggactggaagggctggaggtcccctccctgaggacagcctctgcagctgctggccaaaggcatggcagccccaagagtcagccgcccgaggctgagtctggaatgtcttgttttgttgtgtcattaacacagtgttcatttttagggcctgacttgggaacgggtgccaagagcattcctgaggagtcagaagggagggtgtttattgtcaggctacanaagtaacttccttcagtaatccctcaagtactcagcaaaccttcattaggcacctactactgtataccaatcactgcaccaggcccaagagatgcagagaggatcaattagctataatccctgtccttggacagctcccaggactgtgggagaggctgacctatcaagggacagcccccaggggtaagaacagtgacagcggaaagcccagcgcactgtagggtagagatggtgacgcagaggggtggcctccgggctgcttgagtgcactggccctttattctagggaatgtgctagaaggacatagttacctctccaagagggccttt

SEQ ID NO: 3695 - DNA, 661 bp, Homo sapiens
  misc_feature [331]..[331]: Chromosome 8, SNP identification no. = rs2976551
  misc_feature [331]..[331]: allele = c, in linkage disequilibrium with rs6980682, respectively
  misc_feature [331]..[331]: n is a, t, c or g
tgagtgcactggccctttattctagggaatgtgctagaaggacatagttacctctccaagagggccttttgcaaaggtattcttttgtaattcgtgattatttttcctaattgcaagactcacttattcctactttcagaaatcttaaatgctatgaaatgtgtgagtccaacagtaaacattcctcagagataaccaatgttggctgtgtgcatttcttcagcattttcttgcaggcttcagcataactaacactcctgggggcttaccgtgccccagacctcctaagaaggcagcatgcaactgctcactaaggtaagtaccatctgcntgtccagcttacacgcagagaaattgagacacactcagaatgagtcacttggtccagatcacgtaggaaggaaatagcaaaccaagactcaaacccgggatatcaggctccctccaagcccttaatcctgagagggaagaagtcaaacatggctgggcatggtggctcaggcttgtaatcccagcattttgggaggctgaggcggaaggattacttgagaccaagagttcaagaccagcctgggtaacatagtgagagacaccatctctacagaaaaaaataaaaattagccaggtatggtggtgcatgactgtagtcccagctgctcag

SEQ ID NO: 3696 - DNA, 661 bp, Homo sapiens
  misc_feature [331]..[331]: Chromosome 8, SNP identification no. = rs2976552
  misc_feature [331]..[331]: allele = a, in linkage disequilibrium with rs6980682, respectively
  misc_feature [331]..[331]: n is a, t, c or g
tattcttttgtaattcgtgattatttttcctaattgcaagactcacttattcctactttcagaaatcttaaatgctatgaaatgtgtgagtccaacagtaaacattcctcagagataaccaatgttggctgtgtgcatttcttcagcattttcttgcaggcttcagcataactaacactcctgggggcttaccgtgccccagacctcctaagaaggcagcatgcaactgctcactaaggtaagtaccatctgcgtgtccagcttacacgcagagaaattgagacacactcagaatgagtcacttggtccagatcacgtaggaaggaaatancaaaccaagactcaaacccgggatatcaggctccctccaagcccttaatcctgagagggaagaagtcaaacatggctgggcatggtggctcaggcttgtaatcccagcattttgggaggctgaggcggaaggattacttgagaccaagagttcaagaccagcctgggtaacatagtgagagacaccatctctacagaaaaaaataaaaattagccaggtatggtggtgcatgactgtagtcccagctgctcaggaggctaaagtgggaggattgcttgaccccagcagtttgaggctgttgtgagccgtgattgtgccacttcactccag

SEQ ID NO: 3697 - DNA, 661 bp, Homo sapiens
  misc_feature [331]..[331]: Chromosome 8, SNP identification no. = rs2976554
  misc_feature [331]..[331]: allele = a, in linkage disequilibrium with rs6980682, respectively
  misc_feature [331]..[331]: n is a, t, c or g
ggaggctaaagtgggaggattgcttgaccccagcagtttgaggctgttgtgagccgtgattgtgccacttcactccagcctggacaacagagcaagaccctgtctcaaaaaaaaaaaaaaattagtccagtcactcccccatcctcacctggctagtgtaggagccaaggtatgcacccaagcagtcttattccataacacttggacttaaccacactctttgctgccttcaacctaatgattaaatatatatacttacatgaaaacattatttaccagcgtctcatggtgaatgggacattctgcacttcaaatagaagatcttgtatcnctttcattgttattacaagcaaatctgcctccttcacttcaaggtcaatttggcaatccaaatctcagcataccattgttgatttgcccaatgtcttctttatgattttttgggtggtttctgattatctgctcttgcaaacaatgcttcaacagagatctcagtagaggttgctgagagttgcatgaagactgattcctagaaaagggatggctgggtcagtggtgtgcacctgcatgccctggcatacctgcccagcgccccatgcaaagacttccagggctcattttcatcacctaaagaaagaatgtcagagccgggtggtgttta

SEQ ID NO: 3698 - DNA, 661 bp, Homo sapiens
  misc_feature [331]..[331]: Chromosome 8, SNP identification no. = rs2976555
  misc_feature [331]..[331]: allele = g, in linkage disequilibrium with rs6980682, respectively
  misc_feature [331]..[331]: n is a, t, c or g
gctagtgtaggagccaaggtatgcacccaagcagtcttattccataacacttggacttaaccacactctttgctgccttcaacctaatgattaaatatatatacttacatgaaaacattatttaccagcgtctcatggtgaatgggacattctgcacttcaaatagaagatcttgtatcgctttcattgttattacaagcaaatctgcctccttcacttcaaggtcaatttggcaatccaaatctcagcataccattgttgatttgcccaatgtcttctttatgattttttgggtggtttctgattatctgctcttgcaaacaatgcttcnacagagatctcagtagaggttgctgagagttgcatgaagactgattcctagaaaagggatggctgggtcagtggtgtgcacctgcatgccctggcatacctgcccagcgccccatgcaaagacttccagggctcattttcatcacctaaagaaagaatgtcagagccgggtggtgtttaaaggctcctccccaccatggctggtggcgggatcccatttcacagttttcatgcactgtgcatttttatctgtactcttagatggctttgggaaggtcatgatctaaaaaggaaaaaaaaaatcaatcatgctatcagcaaaagccacggt

SEQ ID NO: 3699 - DNA, 661 bp, Homo sapiens
  misc_feature [331]..[331]: Chromosome 8, SNP identification no. = rs2976558
  misc_feature [331]..[331]: allele = t, in linkage disequilibrium with rs6980682, respectively
  misc_feature [331]..[331]: n is a, t, c or g
agagccgggtggtgtttaaaggctcctccccaccatggctggtggcgggatcccatttcacagttttcatgcactgtgcatttttatctgtactcttagatggctttgggaaggtcatgatctaaaaaggaaaaaaaaaatcaatcatgctatcagcaaaagccacggtgcagtcagcagctggcatttccaggaggctagtcgtggcttggcagttcttgtgtgtaagttacacagtggtgcctcttcctccaagcagccccagggagcagaatcccagctggatttcagcttctctgtgcccccatggccaggtgcccttgtgcagtgnacagcctgaccaacctcgcacattattctagttagagctgtaagctggatcccagctgcctggactcaaatccaatctttaaagcctattaaccatatgcccttagacaagctacttaaactgtgtgtgtcaatttcctagtgtgaaatagaagctgattataataatagtgcctcccttatagggcacagcagcagcagtgaggaattaagttaaaatatcaaaagcccttagaagagtacctggcatataataaacactccatagatgtttgctactaagcaattaataatcctactgtgccattatttaaggaggccctactattcc

SEQ ID NO: 3700 - DNA, 661 bp, Homo sapiens
  misc_feature [331]..[331]: Chromosome 8, SNP identification no. = rs2929931
  misc_feature [331]..[331]: allele = g, in linkage disequilibrium with rs6980682, respectively
  misc_feature [331]..[331]: n is a, t, c or g
ccaggcgattccaatgctgactcgagtttgagagccgctgctcgccatgagtgtttcacaaattgcatagcacagccattcctttgttgttccctctacctgggatgcctttctccctatctctgtcagtagcagactcactcatgtttgggggactctgaacacgccacctcctccagaaagtatccccagatccccacagtctggaggaataactccctggggatactcacaggctgtgcttgtctcttcaatccctggtttattcaggccagagcttcctgcctccccaactgggatgtgagctcctttctgcagtaccaggttttcntcaactccccagcccctggctccatcgagccaaacttacattggtattcaataaatgctgttggtttggtttttttgtttttttttttttttttttgagacggagtctcgctctgttgcccagcctggagtgcagtggtgcaatctccgctcactgcaagctctgcctcccgtgttcatgccattctcctgcctcagcctcccgagtagctgggaccacaggcacctgccaccacccagctaattttttgtatttttagtagagacaggatttcactgtgttagccaggatggtctcgatctcctgacctcgtgatccacccgcctcagc

SEQ ID NO: 3701 - DNA, 661 bp, Homo sapiens
  misc_feature [331]..[331]: Chromosome 8, SNP identification no. = rs2976565
  misc_feature [331]..[331]: allele = c, in linkage disequilibrium with rs6980682, respectively
  misc_feature [331]..[331]: n is a, t, c or g
aaagcatggaggaatgtgagcacccatctggtgcatcactcactggctatagccatcaatgtgttcattcagtcctttactgagcaagcagcacctctgagccctactgtgtgctagtacagtgatggactctaggtatacagcgatgaatacaacagtctgggttttgccatatctttaccctgctgaggctctcagaggaggatggatgacattccacgtgatgacacaggctgatgaccctctgggcatccaggcacagaaggcaggggctctggaggtgaaagttgccttcactctcatggccctttaacgaaagaccttgtcttanccatgttaaattcagtttggtttaaatgtttcttcatacatagtgaactatcacctaactggatgtgtaaacaggctataaccaactctagtaccaatctctgggtttcagccaatcacagacagccaactcttcaaaccatgttcaaagaaggcaaacgccaagctagaacccatccagctgtttctgttccttacttctgttttccatatgtcactctcttttttctgcccataaatcatcctcgaccacgcggtagcctggaagcatctctgaacctattctgttttggggattgcccaattcaagaaccatttttcactcaattaa

SEQ ID NO: 3702 - DNA, 661 bp, Homo sapiens
  misc_feature [331]..[331]: Chromosome 8, SNP identification no. = rs2976566
  misc_feature [331]..[331]: allele = c, in linkage disequilibrium with rs6980682, respectively
  misc_feature [331]..[331]: n is a, t, c or g
agtgggttttctgtatttatttatgtatgtatatgcatccatttaatagtctgtgtttataggttaataccccaaatgaccctttattgggataagacagaatcattctttgattccctgcatccctgttcacatacccattcctccagatgctgacttgcttgtcccctcttccttgaaacattcccctcaggctccacatgcacagtgaagaagcaggcaacatggcgtcagccaggtagagaacccaactgcataataaaagattagggtgaggcagccagcttcctcgcaagctatgcaaacggcacacctagtccaaaccagttcntccctcactatgcaaatggcatacctgctccaaccaatcctttgtatcctatgtaaatcagacaccatctcctcaagctcatctgtaaaacctcttgcactttgccacagactggaagacccactcaggagcccctctctctctgcaggagagagaacttttctctttctttcacttattaaacctctgctcttaacctcactccttgtgtgtccacatccttgatttccttggcacgagggaacgaaccttgggtattaccccagatgacgacgattcttcacccccactggttgtgaaagatgaagaatgcagcccagattgcagctg

SEQ ID NO: 3703 - DNA, 661 bp, Homo sapiens
  misc_feature [331]..[331]: Chromosome 8, SNP identification no. = rs2976567
  misc_feature [331]..[331]: allele = c, in linkage disequilibrium with rs6980682, respectively
  misc_feature [331]..[331]: n is a, t, c or g
acagccctgaagccatcttgattttggcacagtgaaattgatttctaaacttctagcctccagaactgtgagagaatacatttctgcagttttaagccacacagtttgtagtagtttcttacagcagctctagaaaatgaatgcaagcatcgcctagcacatttagagttcatgagagaacacccagcctcccaaagtctactgctctgaaatagcacctagaatgtgtgtccaaaattcagattcccaggctccaccccagaaatacaaaaccggaatgtttagggggtaggccctgggcagctgcatttttaacaagctgccaggtgangcatgtgattggggagctccagttctatcatcaacatcaagcttggccctcccagcaggcctgggagacaattaccactgaagaacccagggaagctgggagcaaaggaaatctccaaggaagaaggctggatgggtacaatgtctgggcatataaagtttttatctatattttcatctgcatatgtagagtgaagacacagtgtacacgcattaaaataacctaaacaacacctgctctatagaagaaaaggagagaaaataatccacacttgccacttgaattatgtgggtggttttgcttgctcttccttccctccatgagagtgtg

SEQ ID NO: 3704 - DNA, 661 bp, Homo sapiens
  misc_feature [331]..[331]: Chromosome 8, SNP identification no. = rs2929930
  misc_feature [331]..[331]: allele = g, in linkage disequilibrium with rs6980682, respectively
  misc_feature [331]..[331]: n is a, t, c or g
tagttccttatttcttgtgttgcctggctccccctgttagaatgtgtgctccctaaggacagggtctttgccactttgttcccccataactgttcaatggctctgcacagttatacacaatacataccaaaaacagtttatgccacattttatcaaaacacacttggctaaatcctggagcagcactggtgttgtgaaaggtcccacaccatgtgagcacttggaaacttagggaacaggctcttgtctccttttcacacccactgggggcacactctcatggagggaaggaagagcaagcaaaaccacccacataattcaagtggcaagngtggattattttctctccttttcttctatagagcaggtgttgtttaggttattttaatgcgtgtacactgtgtcttcactctacatatgcagatgaaaatatagataaaaactttatatgcccagacattgtacccatccagccttcttccttggagatttcctttgctcccagcttccctgggttcttcagtggtaattgtctcccaggcctgctgggagggccaagcttgatgttgatgatagaactggagctccccaatcacatgcatcacctggcagcttgttaaaaatgcagctgcccagggcctaccccctaaacattccggtt

SEQ ID NO: 3705 - DNA, 661 bp, Homo sapiens
  misc_feature [331]..[331]: Chromosome 8, SNP identification no. = rs2929926
  misc_feature [331]..[331]: allele = g, in linkage disequilibrium with rs6980682, respectively
  misc_feature [331]..[331]: n is a, t, c or g
atggggcttcctgttcccactccagctgttgggctgcctgggacacgttctctccccttctgcccctggttagtcctcctctgtctgccacttcctccaggaaggaacccgggcctcctctgagcctccccatccccttgggcctccatctgtcagaactttggctccctgcaactgaactgaagtgtgtgtgatgtctccctccctgcgggctgcatctctcttcctaggggcggggctgggctgccccagttctctctgaatgtccagtccctagccagtgctagggaaccactgccaaagtaacccatggacacagagagcagggggnctccatggctcccactggggaagtggtcccttcaccacagggaccaagacacacgtgtccaagaaccgtggagtctccttgcaaactgtgggaactggcctcagctggcccatatggcatgagaagaaaaccagcaggggaatcactgagttcagggagcctgtgccagtttcctgggttttcccggcagtgctgtgtttcttgtttaaggctagagtttaaggcccaacagctgtgaagtgggaggaagttgaaaccagcttggcagaggagattctacattgccatggggcagggggaagcctcatgatgaggaccccttggactcaa

SEQ ID NO: 3706 - DNA, 661 bp, Homo sapiens
  misc_feature [331]..[331]: Chromosome 8, SNP identification no. = rs6980682
  misc_feature [331]..[331]: allele = a, g
  misc_feature [331]..[331]: n is a, t, c or g
gcatgccttttgctatccactcccttttattcattcaacaagcatttcctgagggctcaggaattgggggtatagctgcaaacggggcctcaagggccctgccctcaggcagctgacagtctagacaggagacacgcagtagccagatgagaaaccatatgactccacagattacccaggcacctgccatgtaagggggaagccacctgggcacccaggaagcccctgctgctcacagccatcctctcctcaccttcagcacacactttgccttaagagggagaaggaaactaagccgggggtattaaatgaggtcccaagtcctccatcntccaaatcctctgcatggcaaagccaggcttctccccagcgagaatcaggtgccctccctgctccaggctggcccgctgcagtcagcctcctctgagccagcctcagcttctgacttcacggaggccctgccatctgcacagcacatgccctcaggtccagaagagactgggcagagcaggtgttcgtatccatttttcagacctgcaagctgtggctcagagagcaaagagtcccacccagggttaccgttgctggtggcagggcctggcacctcacatccatgcaccttggggtagaattataggcctgtctcctccactgagctggg

SEQ ID NO: 3707 - DNA, 661 bp, Homo sapiens
  misc_feature [331]..[331]: Chromosome 8, SNP identification no. = rs16904911
  misc_feature [331]..[331]: allele = c, in linkage disequilibrium with rs6980682, respectively
  misc_feature [331]..[331]: n is a, t, c or g
tgccagagaacctggccaccctgactgtctgccaaatccctttccactttgtgctttagtcacagttgcaagcgcttatatggcaggtccacctctcagtgctatgcctgcattacctcaatgattccatccatttccctaggggaaaaggacaccagtgttaaagttctaagatgaggagacacagacaagctgaattctttgcccactgctgcctggttagaaatcagcagagctggggtttgcatttgaggttctggagctggactccgacctttgttattacgtgagtggcctttgagtggtgtgtggggcgtgtggagtcagcaangctcctgtcgctgagcaccttgggtgacgcctgagtctctgagcactgggaagccactgggaggtgttaagctcagaccatgggactttaggagagggctctgctgaggtctggggagggacagctggggtgagttcaggacaggcggcgcagggggagactgctcaatagccaagcactggccacagaaaggaaaaaacagaatgactagttaaaggacttggctgcaaagtcaggctgtgcaaggatgctgtcccagcacagatagggaagggacacagcccggaatcccaggcggcagccgcactgccacgtggaggaacaagaagg

SEQ ID NO: 3708 - DNA, 661 bp, Homo sapiens
  misc_feature [331]..[331]: Chromosome 8, SNP identification no. = rs6999391
  misc_feature [331]..[331]: allele = c, in linkage disequilibrium with rs6980682, respectively
  misc_feature [331]..[331]: n is a, t, c or g
agactgttttaagcactttgcatgagtcagctcctgggtaagataaatactattcttttttttttttttttttgagacagggtatcactctgtcacccagctaatttttgtatattttggtaaaggcagggtttcaccatgttggccagactggtcttgaactcctgacctcaagtgatttgccttcctcggcctcccaaagtgctgtgattataggcatgaaccaccacacccgataatcactattcttattcccatttgtagatgaggaaactggtacagagaggtcagataatttgctgaaggtcacacagctagctggtggtggagntgggtgaggtttgaacttgggctttcaggtttcatagtgttctctagtaaccctccttccctgctgcctcccacaagccagtctctagccaattcttctgtggttaagggaatcatttttcatgatactaacagacaaacattccttgttcaatgttattatttttctgaattttcaaagcaactttatatgggtccagagatgagtaagatagcttccctggcccttgaaggacttatgctctactggagaaggaaaaatgaagctataatttcactttctccttttgacagatgatgaaatatcaggagaggcatgaaatcgacccaa

SEQ ID NO: 3709 - DNA, 661 bp, Homo sapiens
  misc_feature [331]..[331]: Chromosome 8, SNP identification no. = rs13265709
  misc_feature [331]..[331]: allele = g, in linkage disequilibrium with rs6980682, respectively
  misc_feature [331]..[331]: n is a, t, c or g
caggtcaggctgcctcctttccacgctcccaagccactagagaatgtactttggcagacatgacagctgtgtgctaatatttgatggacccttgaggggaagaagttctgccttcttctctgcgactccagaggagaggactacagccttggttgggatttagaggggacaaacagagatctaatatggagcagacttcatggaggggagctcatgtatttctgagaaaagcttgtgtttcagggactacagtgtatctctggtggtatagagagactaagaatccagccccaggttagctcaggacgaaggaatgcaatatcttcttgcntctgtttctgtcctgtctaaaattgtaagtgctgtaaggaaaatacccaaggcactcatgtttccccacacagcaggcagcaggcagcaggcagcagactgcatcttgattgggataatattattctgtaggttccttccatgatttcctcataaattcaccctcatgaaaatccaagaggagctcagtgtttatgtaagaccctgagcttattcttcttcctcttatgaagttagattaaattagttaagaaatgaagaaaaaagaatttaaaaaaatttcatctccttttctctgcatgagtaagtatgtttgcatgaaaaataacaa

SEQ ID NO: 3710 - DNA, 661 bp, Homo sapiens
  misc_feature [331]..[331]: Chromosome 8, SNP identification no. = rs13268338
  misc_feature [331]..[331]: allele = a, in linkage disequilibrium with rs6980682, respectively
  misc_feature [331]..[331]: n is a, t, c or g
tcccaagccactagagaatgtactttggcagacatgacagctgtgtgctaatatttgatggacccttgaggggaagaagttctgccttcttctctgcgactccagaggagaggactacagccttggttgggatttagaggggacaaacagagatctaatatggagcagacttcatggaggggagctcatgtatttctgagaaaagcttgtgtttcagggactacagtgtatctctggtggtatagagagactaagaatccagccccaggttagctcaggacgaaggaatgcaatatcttcttgcatctgtttctgtcctgtctaaaattgnaagtgctgtaaggaaaatacccaaggcactcatgtttccccacacagcaggcagcaggcagcaggcagcagactgcatcttgattgggataatattattctgtaggttccttccatgatttcctcataaattcaccctcatgaaaatccaagaggagctcagtgtttatgtaagaccctgagcttattcttcttcctcttatgaagttagattaaattagttaagaaatgaagaaaaaagaatttaaaaaaatttcatctccttttctctgcatgagtaagtatgtttgcatgaaaaataacaaaatgaatcaaggaaggaagaaagaaa

SEQ ID NO: 3711 - DNA, 661 bp, Homo sapiens
  misc_feature [331]..[331]: Chromosome 8, SNP identification no. = rs2736862
  misc_feature [331]..[331]: allele = c, in linkage disequilibrium with rs6980682, respectively
  misc_feature [331]..[331]: n is a, t, c or g
gcatatttttatgtttcctatattttacctaattggcaaggattacttctagtgtcataaaaatggaggagaaagacagacatccacttgcactgacggggaactgcatgagtgggacatggttgcagtggcagctggcttcagggctccctctgtcaagctgaaaaatgagcattcctcccagaaaaccatcacctagcaaggggggagggtctctgagcccattaggctagagttactcttcccattgcatccaaaatgatcagaagtggaagagttgttttgaggctgggacaggatgatatgcaatccatcagggcccatatgatgntcacccataggcaacagcaacctaggaaaaattctctgcatcctgcctgcagctgatgctgtcaatgtcctgtctagatgccctcagcggcctgttgcttccttcccaaagcacctgcatgtatgtctgagcagaagcttgctcgtcctgtgcagagagcagaccagaggagccctggagtccaggagcagcccgtagacaatgacagataggatttggtggatacacgtccagctctttcacccaccagtgctgagtcaagctctctgctgtctcccagagacacccaataggactgagccatggtgctcacagttgtgactgctcgtt

SEQ ID NO: 3712 - DNA, 661 bp, Homo sapiens
  misc_feature [331]..[331]: Chromosome 8, SNP identification no. = rs11998165
  misc_feature [331]..[331]: allele = g, in linkage disequilibrium with rs6980682, respectively
  misc_feature [331]..[331]: n is a, t, c or g
tgagatggagtctcactctgtcacccaggctggaatgcagtggtgtgatcttggctcactgcaagctctgcctcccaggttcacaccattcttctgcctcagcctcccaagtagctgggactacaggtgcctgccaccatgcaccactaattttttgtagtttttagtagagacagggtttcaccatgttatccaggatggtctcaatttcctgacctcatgatccgctcgcctcagcctcccaaagtgctgggattataggcatgagccactgcgcccggccaggttaaggattttaagacagggagattgccctgaagtatctaggtgngacaagggtaatcacaagggtcctaaagtgttagaagaaggaggcagaagagccagtaaagatgtgatgatggaagcagatgtcagaaagatgtgattgttgactttgaggatggaggaagggccaccagccaaggagtgcaggcagcttctagaaaccggaaaaggcaaggaatcgaaatttccccaaggcttccagaaggagtgtagccctgttgacaccttgatgtttgcccattgagttccattgagtgtgcctgacccctaggtctgtaagataataaggcccccaggactgtaagataataagttcatgctgttttaaggcact

SEQ ID NO: 3713 - DNA, 661 bp, Homo sapiens
  misc_feature [331]..[331]: Chromosome 8, SNP identification no. = rs1018356
  misc_feature [331]..[331]: allele = a, in linkage disequilibrium with rs6980682, respectively
  misc_feature [331]..[331]: n is a, t, c or g
ttgctgcttattttctattcttatagataacacaacaatgatgatttttcaacattaataattgtccagatgtctgtttttttttctttttattatgagtccctagaagtagaattaggggctcagaggataagaagtttataaaggaatacataaggctaagttgaattgtaagaaacgtgttccaggaacttcaagagtgatgagtactagcattttttttaactttgggaatttgctaggtaagcaatatgtttctttgactgctagtgggggaaatctttttccattaattcctgaaccattcacatttcctcttgctgtcttttgngcccgtgggagccaacgatgtagacctcaagcactgactttggagagggccttggccgctgagtctggacggtctgccccgagctgctgggtctcagcaccctgcctcatgctgcctgctccagggaggcagatcagtgcagcagcatggaacttcacctggcagagtgggcaggcagattccagaagaatctggcacagcacagaggtttctgggaaaagccacagcccacctggctagaacctgaggctgacttggcaccccaccacctcctttcctctgtgggaggcttggatggggcaggagagggggagccttgaggaagaggca

SEQ ID NO: 3714 - DNA, 661 bp, Homo sapiens
  misc_feature [331]..[331]: Chromosome 8, SNP identification no. = rs2736849
  misc_feature [331]..[331]: allele = a, in linkage disequilibrium with rs6980682, respectively
  misc_feature [331]..[331]: n is a, t, c or g
tgtgttttccaaaataacattacattaagtttatgttacatttaaatcagaataaatataggtgttctttttttaacctgcctctgagctatattgtctcactcattcattacattgaccaagtgcctactatgtggtaagcactcataaaatcgggagttacagagacaattaaggtctggtgtgagttccttccaggagctgtcagatttgtggaggaggtgaaagccgtggctggcccagtcacacagagcctttagtgaaccacctttttaaggaaaggtcttaggatgaaaacaggtctgtctgcagagctctaccaacagctgcntcttcagcaatcagcctccagtgtggcactgacctcacctccgcacaggtttccaacatgccttcctggaaagggctccaggcctctcaggaggtcggtcatagttttgaaaacaaagctgaccaacaatagacaaaagcattttctggctccgcttttcaggagcctggtcccaactctggagattcagatctcactccacaatggaccctcacaaacccctcccttacattccacatcaggttggcctggcctggcctcacagggcagcccctattctcccaaggcaccagactccttccctcttccttccagccatggagactgtgc

SEQ ID NO: 3715 - DNA, 661 bp, Homo sapiens
  misc_feature [331]..[331]: Chromosome 8, SNP identification no. = rs2736856
  misc_feature [331]..[331]: allele = g, in linkage disequilibrium with rs6980682, respectively
  misc_feature [331]..[331]: n is a, t, c or g
aagtactgggatcccaggcatgaacaacaatgctcagcaatgacccatttttaaatgtctagggccacctcttatctcgcccaggctgttttcactgccattccctccacattttgttctaatggcatgctagttttctgggtttcctcttcttcttctgcctctcctctattccatattatgctttttgactcaacaaaagttgcaaccatatatcccatctcacatgctcttctaccatgtaactctgccatgctcccaaccagagtggcagtttctgcctcgcccctggactactcagcctgcgacggctccaccccagcagggcatngagagagtaattatgttccctgcaaagcagcttccacctcctccactggacgctgcttttggaaacctgagctgacaggtgagaggttcgactcccctgagccacagtactgtgaggaagtcttgatcacctggagaggttgtgacagatgctctggtcaccagccctgaatgaagccccatctgtaaaaaccaaaagtgccatctgtaaaaaccgaaaatagcaggcccgaggtgcctgctattgagtcaccccaattggttgagtcttcccagttgaggtcccagacaccctggagcagaggcgagccacccctgccatgcactgtcc

SEQ ID NO: 3716 - DNA, 661 bp, Homo sapiens
  misc_feature [331]..[331]: Chromosome 8, SNP identification no. = rs7836099
  misc_feature [331]..[331]: allele = g, in linkage disequilibrium with rs6980682, respectively
  misc_feature [331]..[331]: n is a, t, c or g
gaaagttcagcgggtaaagggaagccacgtttatgtaacaggaagcctgatttccaggacgtgcaatacaatcaaagctctatttgtggaacaattctgtgggctccaatttccttagaaactcaaatgaaacctctgccaatggacaatggaagggctcagcttttctctctcactgttcctgttctgaccctccctccttatttttctctgctcctttctattctaaaggcctgctgctgggaatgtgtaacctgtaccccctaatcggggcttctagaagaattcccacccatcgagcacaggactggacagctgccctgcgactcancctgcaacaggctcctgtctccccaacctctggcgctgaggcccagcaatggagatgcttgacccctacattctccccaaaagcagtaagggggctagctttatctaagctttctattgttgctaatgccctgtgagattctgagcacgtcttctaaccaccctgggccaaggttttgacatccatgaaaaggggttattaacacatgctctgcctgtctcatagggctcattatcaaatcagaaaatatataaaattttaatataatatttatattcataacatgaatattataataatataagattcgcatttaatataataaatata

SEQ ID NO: 3717 - DNA, 661 bp, Homo sapiens
  misc_feature [331]..[331]: Chromosome 9, SNP identification no. = rs1007937
  misc_feature [331]..[331]: allele = t, in linkage disequilibrium with rs7874553, respectively
  misc_feature [331]..[331]: n is a, t, c or g
tctccaaaaaaaaaaaaaaaaaagcaaattaccccaaaactagcagcatgagactataaatgtttatcatttcacatagttcctgagaaccatccagtgagctgcttcactggatggttctggctcacagtctctgataaggttgcaatcagaatgtcactgggggcttctgtcatttgaaaccttgaccagggctggtggatccacttctgagaaggcttcttcactcttctaaggaggctcagcaactcacatggttgctggcaaaaggtttgtcacgtgaactgtcccatgacatggcagctggttttctccagaccaagtggggatngagagaaagacaaaaagaatgaccaagatggtggctgcaatgtcttttataaccgaatctcagaagtgacataccatcacttctgccatattctatggtcgcacaaaccaaccctggtacaatatgggaagggactgtacaaggatgtgaatattcagagacagggaggccggctaccaggccacagctggttttcttttctttttttttttttttttgagacggagttttgttcttgttgaccgcccaggctggagtgcaatggcacgatctcagctcaccgcaacctctgcctcctgagttcaagtgattctcctgcctcagcctccc

SEQ ID NO: 3718 - DNA, 661 bp, Homo sapiens
  misc_feature [331]..[331]: Chromosome 9, SNP identification no. = rs6476918
  misc_feature [331]..[331]: allele = c, in linkage disequilibrium with rs7874553, respectively
  misc_feature [331]..[331]: n is a, t, c or g
ttcaataaaagactcttacgtaaccagatcctatgagcagagagccatcgtgcctccaacttagtttcttcagattggctggttttggtgctcaacttttgactttacccaccttcctgacaaagtgttgaggaccactaggtaagcatgctatcttcaacgttaaaaaaaaaaatcatgattgaaggcagctgcacttcatatatcaaggagcattgaatataactaactctaaaacttcatcaggtcatgaggttttattgacatcagtgtatttggcttcagctgtgataatcatgtggcgcagtctcttttcctccccgcaatgccntgcctcccttggaagactccctccaccccaccccagccccattcagcttcgttcagaaaaaccttcatttttatctcccattaaagtttgtctgatgaaaaggctctgaggctcaaatgacagctcagttgtttgaaacctgctgggttagagaatggtgctataaggttaagatcaaaaggtcaccaggtcagggtttccttgctgaggaagaaaagcttcagtgacagtgactcagtgtaaagttatcatcactagcataattaaacacacacacacacacacacaccacaatgcatacactgtcccagctggaaggggtcagggtgg

SEQ ID NO: 3719 - DNA, 661 bp, Homo sapiens
  misc_feature [331]..[331]: Chromosome 9, SNP identification no. = rs10974844
  misc_feature [331]..[331]: allele = a, in linkage disequilibrium with rs7874553, respectively
  misc_feature [331]..[331]: n is a, t, c or g
aaaaaaagttaaacgcagagttatcatatgaccaagaaattccattcctagatacatacctaagagagaggaaaacatgtttattcaaaaacatgcacttgaatattcatagcagcattattaataatagcccaaagtggaacaacctcagtgtccatcaaaggatgaatggataaacaaaatgtggtacatccacacaatagaatattgtccagcaataaaaaggaaagatgtacagaagccccaggagccacagccccagatgaagctggcatccctgggcccaattcctgctgccacagttccactattgccagcccccagaccttgnagatcctccaccgccgacaaggctgctaccaactgccatccttgcagagggggctcctgcaaatcttttaccttgtacttgaagcaggggccagggaagaggactctggaaaggacatgtgggcctgagacaccttaaaaacaggaaaagccctgaggagcacgaaggggaaacttttttacctgtacccttttggggacttttggttaaaactgagaattacattgacatagatcaataggagaaatgcatacgaatttgtttaatataagttttgtgtggcataggagactttacaaggaaatgaagacccaaagatgcaattagaga

SEQ ID NO: 3720 - DNA, 661 bp, Homo sapiens
  misc_feature [331]..[331]: Chromosome 9, SNP identification no. = rs7036591
  misc_feature [331]..[331]: allele = a, in linkage disequilibrium with rs7874553, respectively
  misc_feature [331]..[331]: n is a, t, c or g
ggtctctgctggccctatgctgatgaagacttttttaaggatgaaaatgagccccatgttaattcatgttcaactacagaaaacaacaagtgaaactttgtttgctccaaattggaaactgaaatatggaaacagcagtgtggaaggaaatttaacatatgaaggtgatttatcagaaaacgaaaaggcaaaggatactttattcaattatatttaaaggagggacctaaactgaaagccagaaacaacagaaaatgttgtagaatctttcacagaggagccaagtgaagtttttccataccctgattttctccctcctacggagcttcantaccctggacttgcacagatgaggccctcacaaaatctgaaaattggaaagcaacaggggaaccttcagaaagctctattattggaaatggaaagattacaacatatgactatacaaaaagagaggtcaaagttacaaactactttctgtaccccagcagttactgaatgactttcttcctccaaagctatactgagagtgggacagccaaaactttctgattcactgagtcttcagacatctcgtgtagataaaagttgagaaaaaagaaaaaaaaaaccaatcgggttctttcaagcttgagcaaaatgcttcaaaatggatttggag

SEQ ID NO: 3721 - DNA, 661 bp, Homo sapiens
  misc_feature [331]..[331]: Chromosome 9, SNP identification no. = rs10118798
  misc_feature [331]..[331]: allele = c, in linkage disequilibrium with rs7874553, respectively
  misc_feature [331]..[331]: n is a, t, c or g
ttatcagaaaacgaaaaggcaaaggatactttattcaattatatttaaaggagggacctaaactgaaagccagaaacaacagaaaatgttgtagaatctttcacagaggagccaagtgaagtttttccataccctgattttctccctcctacggagcttcagtaccctggacttgcacagatgaggccctcacaaaatctgaaaattggaaagcaacaggggaaccttcagaaagctctattattggaaatggaaagattacaacatatgactatacaaaaagagaggtcaaagttacaaactactttctgtaccccagcagttactgaangactttcttcctccaaagctatactgagagtgggacagccaaaactttctgattcactgagtcttcagacatctcgtgtagataaaagttgagaaaaaagaaaaaaaaaaccaatcgggttctttcaagcttgagcaaaatgcttcaaaatggatttggagcaatgctggaaaatataaatgaaattctagaccaccaactctaaaaagttcatccaccacaaaacagttggttgcaacttaggactttaaaactcttaaaagttcatttttaaatccgtggcaagaactttcagcaaggaccagacaacgcactgactggttaaagtgg

SEQ ID NO: 3722 - DNA, 661 bp, Homo sapiens
  misc_feature [331]..[331]: Chromosome 9, SNP identification no. = rs12347628
  misc_feature [331]..[331]: allele = a, in linkage disequilibrium with rs7874553, respectively
  misc_feature [331]..[331]: n is a, t, c or g
caagcaattctcctgcctcagcctcccgattagctggaactacaggcacacgccaccacgcccagctaatttttgtacttttagtagacacggggtttcaccatgttggccgggatggtctccatctcctgacctcgtgatccacccacctcggcctcccaaagtgctgtgattacaggcgtgagccactggcccaatatgacctatatttaccccatcctagcagactaattatttgttgtcttcacttccagtgcttttccatgtctgttcatgtttttatgaagtcacaattctaatattcaattttgtattttgtttcttaacacantatcttaatattgcttcagtctctgactttttaatccctgcatatgcctaaggatatgctttcatttaataatcctcttattagaaatgtgtgttaatttctggtgttttactagtacataccgttgtggaaatcatctttgtgcatatagtttttacctccctcttgggtatttcataaatttgagatttttgtttatgtggcttgggatctttgttaaactgctgcctgcagagttatccttgaacctaatatggaattgattaaagaaatcttttttatttttttgagacaggatatcattgtgtcacccaggctggagtgcagtga

SEQ ID NO: 3723 - DNA, 661 bp, Homo sapiens
  misc_feature [331]..[331]: Chromosome 9, SNP identification no. = rs7850663
  misc_feature [331]..[331]: allele = g, in linkage disequilibrium with rs7874553, respectively
  misc_feature [331]..[331]: n is a, t, c or g
taaaaatagcataaattgaacctttgtggcaatttcatttaggtatcactgattaattttctttatatggtcctgtttacaaaggtattgagccaagagcttgaaaggatataagaaggatcataccattaagtagttgattgtccagaaattatatctaataattaaaaataccagttaggcaaaattcttacacatgaccaaggagtgttcattctacaaatgcagtgcttgtttaagttctgagggagaagtctttcttgtctagatgattaggagctgcttcccccaaaagtaagacttgagctcagctttaaggagtctctagaanttggctagggagcagacatcactaaagagacactgagccttctcaaggagagagatcagcggtgcatagggagagccccggttgaccactggacagtggggttggtgatgctggcttccttactattctttttctggaagataccgaaaataaatgaactaatatataggccgaaaaaagtacttggaggattttgggagaaagctgtttggtacattcaagtcagcatcatggggtttaatggtaaacacctgccagagattagaatgcagtaggctgcttttttgcctaattatagatcttaactcctttcccctcaggtaaaattca

SEQ ID NO: 3724 - DNA, 661 bp, Homo sapiens
  misc_feature [331]..[331]: Chromosome 9, SNP identification no. = rs7850873
  misc_feature [331]..[331]: allele = g, in linkage disequilibrium with rs7874553, respectively
  misc_feature [331]..[331]: n is a, t, c or g
tatctaataattaaaaataccagttaggcaaaattcttacacatgaccaaggagtgttcattctacaaatgcagtgcttgtttaagttctgagggagaagtctttcttgtctagatgattaggagctgcttcccccaaaagtaagacttgagctcagctttaaggagtctctagaaattggctagggagcagacatcactaaagagacactgagccttctcaaggagagagatcagcggtgcatagggagagccccggttgaccactggacagtggggttggtgatgctggcttccttactattctttttctggaagataccgaaaataantgaactaatatataggccgaaaaaagtacttggaggattttgggagaaagctgtttggtacattcaagtcagcatcatggggtttaatggtaaacacctgccagagattagaatgcagtaggctgcttttttgcctaattatagatcttaactcctttcccctcaggtaaaattcagtgataatttctctaagatgaaggctgctagaccagccttcattcagaataagccaatatcacttaactttagtaaacagtacttaaatttgtattatgtgcaaggccctggtgggggaaatcagagactagaaagctaagagttcatagggaa

SEQ ID NO: 3725 - DNA, 661 bp, Homo sapiens
  misc_feature [331]..[331]: Chromosome 9, SNP identification no. = rs7874553
  misc_feature [331]..[331]: allele = c, g
  misc_feature [331]..[331]: n is a, t, c or g
aggagtctctagaaattggctagggagcagacatcactaaagagacactgagccttctcaaggagagagatcagcggtgcatagggagagccccggttgaccactggacagtggggttggtgatgctggcttccttactattctttttctggaagataccgaaaataaatgaactaatatataggccgaaaaaagtacttggaggattttgggagaaagctgtttggtacattcaagtcagcatcatggggtttaatggtaaacacctgccagagattagaatgcagtaggctgcttttttgcctaattatagatcttaactcctttcccntcaggtaaaattcagtgataatttctctaagatgaaggctgctagaccagccttcattcagaataagccaatatcacttaactttagtaaacagtacttaaatttgtattatgtgcaaggccctggtgggggaaatcagagactagaaagctaagagttcatagggaatgaatgtataatgatgcaaaattgtattaataggcaaaatgttagaaatactcaatatcgatacaaaaggttcactctggaaaggaaagggatggagaaattaatgctgagtagagagatctgggtgatatttagggggatttggccttgaaaaatgtgtat

SEQ ID NO: 3726 - DNA, 661 bp, Homo sapiens
  misc_feature [331]..[331]: Chromosome 9, SNP identification no. = rs1410968
  misc_feature [331]..[331]: allele = c, in linkage disequilibrium with rs7874553, respectively
  misc_feature [331]..[331]: n is a, t, c or g
aagacaactaaaaataataaggcaaaaataataagatatctaataaaaaccaggaggcagagagaagaggaaagagaggtgtgagggaatataaattccacttcttccttagcaggaagttaacagacactgtcaaatttatgaactcaagcatagactggcagtatattttatactgcaaattctttgacactcccatcaagtggcaggtcgatgtcccctctgcttgagcctgagcaagttttgtgctacaaccaatagtttggcaaaagggaagttattaacttctgataatatgtcataaaaggccatgaagcttccaactggtttncccaaggtgctcgtagcagggtatgatggttaattttatgtgttgacttggaggatgtttttggatgagattcacatttaaatcaggtaactatgggtaaaagagactgccctccataatgtgggtgggcctcatgcaaacaactaaaggtatgaactaaacaaaaagaccggcctccctgagctggagggaattctccagcagacctccttcagtcttcttctagactctccttgtctccatctgttggcccacaatgcagtatttaggactagcccgcctccaaactgaataagtcaattccttgttttaaaaatcttgtgtgtgtgt

SEQ ID NO: 3727 - DNA, 661 bp, Homo sapiens
  misc_feature [331]..[331]: Chromosome 9, SNP identification no. = rs10974932
  misc_feature [331]..[331]: allele = t, in linkage disequilibrium with rs7874553, respectively
  misc_feature [331]..[331]: n is a, t, c or g
tttttgccttattatttttagttgtcttcttttggttacctttctgatttaaaataaagcagtccattctttaccaggccgtagagatatggaaaactcaggtttgttgaagggtatggtgttggggagggacatggcagaaaagcagcttcaaatggttgaggcttgacaatgaggctcttgttaaaacactccagccactaaaaatgggaattgcctatgagtgtgtcctctttgtgagcctagcaggtggcataatttgacactttttattttttctctttggcttttaaactcagatacctgtttgcctttttcttccctacacttngcatttaaattatgaatgctggaagcaaatgatattttcaccaatgaagaatcttattacagacacatggttgagttgagtgtttgtatgtggatgtgctgtcagaaataagtgctctcttgcttttttcattaccaaagcaatcagttaattggaaacagagtgtcaggagccctgtaactctgttggaggtgttttgggttttttctttttttggattcatttagttaatacaattgagcaatggggcttagtttaactctcagaacacataactaatccctttttataattatcatccaagaaacatataagaacctctagtcttgt

SEQ ID NO: 3728 - DNA, 661 bp, Homo sapiens
  misc_feature [331]..[331]: Chromosome 9, SNP identification no. = rs7024942
  misc_feature [331]..[331]: allele = c, in linkage disequilibrium with rs7874553, respectively
  misc_feature [331]..[331]: n is a, t, c or g
gcatctttttttcatagaaccatgtgtcttcagactgctccatgtggaggtatgggtttctttttaaaatcattttaaagagcagcatagtatgattttaaactccatattttgtttaatcagtttcctattgatttgctacatccaacaatgctgcaaggggtaactttgtacgtgtattatgctcacacgtgatagtgccatgtgtgatgaatatggaattaccaggtgaatgcatatgtgcatttgtacttctcacagatgttactccagctgcctttcatggaagctgtgctaacttatgctctcacaggcaaggcatgaaagcacntgtttctttatatcgttgccagtacagtatgttatgacatttcttaatctttaccaatctgttaagtaaaaaatggtatctcatctgtttttaatttgcatttctcttaggagaatgagcatattttcataaatttataagagctgtttgtatttgtgtttctgcgaactgttcatatcctttgccattgggctgttaccaagttgtatgacattatacctaagggaaataagcccctcatgtgataagaattggagttgtttgcagtttgttcatcttttgattcgggttatattacatttttccatgttggtgaatttattagcagct

SEQ ID NO: 3729 - DNA, 661 bp, Homo sapiens
  misc_feature [331]..[331]: Chromosome 9, SNP identification no. = rs16919226
  misc_feature [331]..[331]: allele = t, in linkage disequilibrium with rs7874553, respectively
  misc_feature [331]..[331]: n is a, t, c or g
acctagtgctcctgcacaggcatagaaaatggaaaattgtttatatattttaccctcctccaaaacactcttagaccatctgatttttatttgacttatctgaatcctgaatagtttttactggatcatactctggtatctggactgtccctggtttgaaggtggtgctgctgggtgagaagccaaggatgagagaggctgtgttttggaggcccagtctgtcaaaactgaggtggcatttctagttcctgatagagtgagacagatgcaaaggtcatgggagctttgaacagtttctatgcattatgtgttgtttttcatcttctggaantgggctggaatttgttttcagcagctaagttcattatgtagttgcctctaagccatgcctccccttttccatgtttgtgaaaagcaaaacaaaaccaccaggcacattatcttttacgaggacctggagattgactagctgacacccccagatttcacatttatgttgagataaggagaataatgtaagtcacccagactttttgtcattctgcatttttattcacagggatgaacagaagcttgcagattgggagaaaggggggggcagaaccagttgttttcaggtggacccaaataatgcatctgctttgataactgcctatctcga

SEQ ID NO: 3730 - DNA, 661 bp, Homo sapiens
  misc_feature [331]..[331]: Chromosome 9, SNP identification no. = rs7857873
  misc_feature [331]..[331]: allele = c, in linkage disequilibrium with rs7874553, respectively
  misc_feature [331]..[331]: n is a, t, c or g
ccctggcttggtgagtggaccgtgcatgggacttcagctcttatgtgccaccttagctgggtgcacttgtttagtgtgcagaatacaccttccatgcgtggtggcctaggatatatctgcacttctcaatcgaaggcaatgttgcctcccagggaatatttggcaatatccgaagaaatttatgattgttatagctgaatcagagagggtaggtgctactgtcatctagtgtgtaaaggccagagatgctgctaaacactctgcagtgtccaggacaacccctgacaacaaagaattatccagccccaaacaccagttgtgctgagaaacnctggtgtctgtgaccctttcaggctcatgggaaaaggcggtcagagagggtgatagctggaggtgggtggacctgagaacaggctccttacatactttgctgcagtctcatttgcttgtggcagttttcaccttgcctctcctacctctctaccatagaactcttactcatcatgttataggttttcatttgtttattcttatgtagccattttcactattccctctcccacccccactcccccaagcagtaaattctgtaatgcaaggcaatcttgtgtccttatttctgtttctgggcacactgtaaaacatctgtattttaatagta

SEQ ID NO: 3731 - DNA, 661 bp, Homo sapiens
  misc_feature [331]..[331]: Chromosome 9, SNP identification no. = rs1658973
  misc_feature [331]..[331]: allele = a, in linkage disequilibrium with rs1094040, respectively
  misc_feature [331]..[331]: n is a, t, c or g
tgacctctgaggtaacaattaaccccaggtcagcccatttgtgcaaggctacagagtgaatgacaaggaaggaatgcacccgattccaatcactgcttatgatggccagtgattaaagatgggaggaaatcccacagtggctcaagggaacaggaacaagttttcagaatggtcagactttgccccccttgtggcattgggcaaaacacttaagtgggtcacctcactgaggcctttcccttccacatggagtttcctggctttgctggccatggtggtgtaatccagcactgcctggacagagctttacaccaacaggtatcagagtcanttccaaagttcactcagtgaccagcttgtgaaaagagcaaataaaccatgggtgttttatctcaaatgccattatctctgcaaaaatgacctctggaatagcacatagaacatcctctatgcattttagaaagtgagtgcattggatataaagacactgcaatggccaggcacagtggctgacacctgtaatcccaccactttaggaggccgaggtgggtagatcacctgaggtcaggagttcgagaccagcctggccaatatggtgaaacccctgtctctacaaaaatacaaaaaattagctgggcatgatggcgggtgtccttaatct

SEQ ID NO: 3732 - DNA, 661 bp, Homo sapiens
  misc_feature [331]..[331]: Chromosome 9, SNP identification no. = rs820506
  misc_feature [331]..[331]: allele = g, in linkage disequilibrium with rs1094040, respectively
  misc_feature [331]..[331]: n is a, t, c or g
agacattctttgttgccacttctaagggctatgatgttgcagtctgcacagaaacgatgtaaagactcctttgtagtcatggtgttcttcaacatatccaaacaaattgggcacattaaatcactgtgcagacttcgaggtgaaaccacaatttctaagccatctgttattgccttctgtaagagagtcactgaggtgttcattgtaactcatataaactgagttcccatgttttgcttaatggttgagttccttttgtctgcacagcctgagacattgaggctcccaccccagccaggggctcactggccatgcaggagcgagactcggntaatcggctgccgcggcagctggcaccgccttacaatatagcgagccgcaaagagcattttaacacaagcctccagggttcccggacaccccactctgtccccacggataccaaaatctgcgcgtatccgcgcatgttcaagtccctaatatattctggtgcatatactatggtgtcaaatttgtatgtaacctatgtacatccttccaaatattctaaatctctaggttatttataataccttaatacaatgtaagtgctatttaaatggttgttatactgtgttttttatttgtataatttttattgttgtattattgctttttatta

SEQ ID NO: 3733 - DNA, 661 bp, Homo sapiens
  misc_feature [331]..[331]: Chromosome 9, SNP identification no. = rs1658943
  misc_feature [331]..[331]: allele = c, in linkage disequilibrium with rs1094040, respectively
  misc_feature [331]..[331]: n is a, t, c or g
agtctcttagctgttgggtccctctcccactagctaagtaggcaaagaacaacccccaacttccagggagaatgcaggaaatcagctaattttttttgttctagttttgtatcttttagtgttcacatgtgcatatacacatagatatgattgactatgcaatatgggtaattatggacattcattatttaccaggtccccactatgtgccttaaactgtgctgtgcgcttgatttatacctttgaacgtaagttcttggacttatgaagcaattaaagagctagattttcgagaataatgaagccaattaaagaacagtgaagaataatnaagtcaataattagtgaataataatgaagaataatgaagtcaattaaagagctagattttcgagaataatgaagcaacctatctttttctttttaagaaagggtatggttctgttgctccgtctggagtgcagtggtgccagtcatggctcactgcacccttgacctcctgggctcaagtgacccacccgggcctcctaaagtgataggcatgagccaccacacatggccaagcaactgttatttaattagaattgtcataagtgcagctgtgacaaagtacagggtgttataaaagtgtaaaacagaaagacataacctaatttggaag

SEQ ID NO: 3734 - DNA, 661 bp, Homo sapiens
  misc_feature [331]..[331]: Chromosome 9, SNP identification no. = rs1759416
  misc_feature [331]..[331]: allele = a, in linkage disequilibrium with rs1094040, respectively
  misc_feature [331]..[331]: n is a, t, c or g
caacagaaccataccctttcttaaaaagaaaaagataggttgcttcattattctcgaaaatctagctctttaattgacttcattattcttcattattattcactaattattgacttcattattcttcactgttctttaattggcttcattattctcgaaaatctagctctttaattgcttcataagtccaagaacttacgttcaaaggtataaatcaagcgcacagcacagtttaaggcacatagtggggacctggtaaataatgaatgtccataattacccatattgcatagtcaatcatatctatgtgtatatgcacatgtgaacactnaaagatacaaaactagaacaaaaaaaattagctgatttcctgcattctccctggaagttgggggttgttctttgcctacttagctagtgggagagggacccaacagctaagagactaattacagtaaatcttctccaagtctgaccctgaaaaaaacggcctatccatataaaaagaacttgtcaactaaaaaggataaggaaaatcagtctgactttggctatctccctatcaaaattcaattaccaacatggtgaaaccctgactctattaaaaattcaaaaataagctgggcatggcggcatgcgcctgtaattccagctatttagg

SEQ ID NO: 3735 - DNA, 661 bp, Homo sapiens
  misc_feature [331]..[331]: Chromosome 9, SNP identification no. = rs17592747
  misc_feature [331]..[331]: allele = g, in linkage disequilibrium with rs1094040, respectively
  misc_feature [331]..[331]: n is a, t, c or g
tattctcgaaaatctagctctttaattgcttcataagtccaagaacttacgttcaaaggtataaatcaagcgcacagcacagtttaaggcacatagtggggacctggtaaataatgaatgtccataattacccatattgcatagtcaatcatatctatgtgtatatgcacatgtgaacactaaaagatacaaaactagaacaaaaaaaattagctgatttcctgcattctccctggaagttgggggttgttctttgcctacttagctagtgggagagggacccaacagctaagagactaattacagtaaatcttctccaagtctgaccctnaaaaaaacggcctatccatataaaaagaacttgtcaactaaaaaggataaggaaaatcagtctgactttggctatctccctatcaaaattcaattaccaacatggtgaaaccctgactctattaaaaattcaaaaataagctgggcatggcggcatgcgcctgtaattccagctatttaggaggctgaggcaggaaaatcgcttgaaccagagaggcggaggttgcagtgagctgagattgcgccactgtcctccagcctgggccacagagcaagactccatctcaaaaaaaaaaaaaaaaaaaagatacaggaacttagccttcagtaa

SEQ ID NO: 3736 - DNA, 661 bp, Homo sapiens
  misc_feature [331]..[331]: Chromosome 9, SNP identification no. = rs1094040
  misc_feature [331]..[331]: allele = g, t
  misc_feature [331]..[331]: n is a, t, c or g
tcagaggaaattcagaggcttgtgaatcaatacaaaggaggttttaagttaatagcaacacagggggattgcacaggtttatctggacattcattttttccagtggtcatgctttactgtggttatatttatgctacatggcccagtggaaagatgcagcctgtacttggggcttttcagagatacccgataaggcaatatttacacccagacttggtaagagggacttgcactttactggcccctacatatcacaaacataagtttaaaaaacaaaattttaacacataaaaaacataattgaagatcgaattggcttttgttagagatntatttaggcaacatctcatctaaagatttagcaaaggtgctctgttgggcatggcagaacagtttgtaaacggtagtatgaacaggaacaaggaaatagaataacacaaaaagcagaatggttaacatcaagttacttcaggttacttttttttttctgaaatggagtctcgctctgtcacccaggccaggctggagtacagtagcgtgatcttggctcactgcaacctccgcccccagggttctagcgattctacctcagcctcccaggtagctaggattacaggtgctggccaccatgcccagataatttttttgtatttttagtaga

SEQ ID NO: 3737 - DNA, 661 bp, Homo sapiens
  misc_feature [331]..[331]: Chromosome 9, SNP identification no. = rs12003744
  misc_feature [331]..[331]: allele = t, in linkage disequilibrium with rs687381, respectively
  misc_feature [331]..[331]: n is a, t, c or g
tagtgaataattcttcttatacattgttggtccacatacctttaaaattgagaaacttgtgtgtcgtgctgaacatttccctctccctctccctctccccaacattgccattgccatgacttttacccccattaccctctagtcaaagcctctacccccattcacctgttctacttcaacagcctcctgctccccctgcattaatttttgcttgcctctagccattctccacacagtcaagggtattttcaaaacacaaatccaattctgatgcttcttttcttaaaatccttcaatgttttcatgccacttttaggttaaaggctcacanctttaatgtggcctacaagccccagggtgatgtgaccccgctccgcctcttaagcctgctaagccccactctgtgcatctgcatgtgcaccttcttgattccctcagcatcacctgccatccaccttggagcctttgtgtgtgcgatgcccaaacactcctgccctgctccttcgtcaggatgaatccttcaactgacaaattgctttcccaggaaaacgctcctggaccatctagcttggtcaggtccaagtatttatcatagtttcctaatacttagcatagcttcatagtatttagcatagcttgtgggttatgcttatttgtatgg

SEQ ID NO: 3738 - DNA, 661 bp, Homo sapiens
  misc_feature [331]..[331]: Chromosome 9, SNP identification no. = rs1215129
  misc_feature [331]..[331]: allele = a, in linkage disequilibrium with rs687381, respectively
  misc_feature [331]..[331]: n is a, t, c or g
gtgcaatggcgtcatctcggctcaccacaacctcttcctcctgggttcaagcaattctccttccttagcctcccgaatagctgggattacagacgcctgccaccgcaccagactaattttttgtatttttagtagaaatggggtttctccgtctctactaaacccagccacaggctggtctcgaactcctgacctctggtgatcctacctgcctcagcctcccaaagtgctgggattacaggcatgagccactgcgcccagcccaagattacatttcaacacgagatttggcaaagacacacagatccaaatcatataatcaggagaacantaactaaggagagtgaaaacaagggagcacaagagagcaagagagagaaaaaaaaaagagagaacaaatgcttactaggtactattacatatacgcgaaacaatcctgtgcactatgtcatataattttattaggtataaggatattttctgctaatttaattggtaaaagaattactaagtagctacagtggtcaaagtcatctctgggtggtaggattcaaagtaatttttattttcttctttttattttttttttgttttttatttttttttttttttgagacaaggtctcactgtgttgcccaggctggtcttgaacttctgggat

SEQ ID NO: 3739 - DNA, 661 bp, Homo sapiens
  misc_feature [331]..[331]: Chromosome 9, SNP identification no. = rs1215130
  misc_feature [331]..[331]: allele = c, in linkage disequilibrium with rs687381, respectively
  misc_feature [331]..[331]: n is a, t, c or g
ctgccaccgcaccagactaattttttgtatttttagtagaaatggggtttctccgtctctactaaacccagccacaggctggtctcgaactcctgacctctggtgatcctacctgcctcagcctcccaaagtgctgggattacaggcatgagccactgcgcccagcccaagattacatttcaacacgagatttggcaaagacacacagatccaaatcatataatcaggagaacaataactaaggagagtgaaaacaagggagcacaagagagcaagagagagaaaaaaaaaagagagaacaaatgcttactaggtactattacatatacgngaaacaatcctgtgcactatgtcatataattttattaggtataaggatattttctgctaatttaattggtaaaagaattactaagtagctacagtggtcaaagtcatctctgggtggtaggattcaaagtaatttttattttcttctttttattttttttttgttttttatttttttttttttttgagacaaggtctcactgtgttgcccaggctggtcttgaacttctgggatcaagtgattctcccaccccagcttcccaagaatgggagccacctttgcaaaaatgatagcagtgagagaaatctaacataactgattccatcttgc

SEQ ID NO: 3740 - DNA, 661 bp, Homo sapiens
  misc_feature [331]..[331]: Chromosome 9, SNP identification no. = rs1215134
  misc_feature [331]..[331]: allele = c, in linkage disequilibrium with rs687381, respectively
  misc_feature [331]..[331]: n is a, t, c or g
actagatgaagcccagcccagctgaattgagatggtggaagttcagggaggccaaggcagctagagttcacagggcacagtactggagaggagagagttgcagagacagataaatctggagatctgtgaaagatccctctccagtcctcagctaattatttatcagcacatgagtgattagagggaacagtcctgggagatcacacagatctggtatgtgaataattcatctgcccaacagacagaccaactcaccggacattaagtggagtactcagaagagtattctctcagtagcggggcaaaattagcccttgaccaaatcctgttncagtccacttagcaaagcttaaaagcaagatccagaaggatacagacatttccaagtaactaacagtgtcccagaacaaagctagagaataattaaaagaatattaaaatatacagcactcaacaggataaaattcacaatttctggcattttatcaaaaagtaccaggcatgcaaagaaggaggaaaacatgattgtgatggttaattcatgtgtcaacttgattggccacagggtgccccaatatttgcttaaacattactctgaatgtgtctgtgagagtgtttccggataaatatcaacaattgaatctgtaacctgagtaaagaa

SEQ ID NO: 3741 - DNA, 661 bp, Homo sapiens
  misc_feature [331]..[331]: Chromosome 9, SNP identification no. = rs687381
  misc_feature [331]..[331]: allele = c, g
  misc_feature [331]..[331]: n is a, t, c or g
gtctgtgagagtgtttccggataaatatcaacaattgaatctgtaacctgagtaaagaagattgatctccccagtgtgagtgggcctcacccaattcagtgaaggcctgaatagacaacatagttgagtgacggagaatttgctctcatgacacgactgtcatcaagcaagaacatcagtcttcccttgcctttgggcccagactagaactggaatttacatccacctctcctgattctcaggccttcagacttgggctagaacaatatcgttggctctcctgagtctccagcttgccaactgcagatcttgggactcttctctgcctctntaagtgtgtgggccaattccataaagaaataaatctcctgttttagccgggtgtggtggcacgcacctgtaatcccagctgctcaggaggctgagggaggagaatcgcttgaacctggtagacggaggttgcagtgagccgagaccgtgccatggcactctagcctaggcgacagagcgagactccgtctcaataaataaataaataaatatcctgttgattcattctttttcttttgagatggagtctcactctgtcgcctaggctggaatgcagtggcatgatctcggctcgttgcaacctccgcttccctggttcaagtgattctcc

SEQ ID NO: 3742 - DNA, 661 bp, Homo sapiens
  misc_feature [331]..[331]: Chromosome 9, SNP identification no. = rs1105191
  misc_feature [331]..[331]: allele = g, in linkage disequilibrium with rs687381, respectively
  misc_feature [331]..[331]: n is a, t, c or g
aatcaacaagcttactaagttctgagtcatcaattttctattcttttttgggaaatgatgctgaagagaaatactgtaaccattggactaattctgctcacctctatcaaggccatactggtgatccctgtgaccccagcccttgtgtacgatctgtcctggaaagtattatttaatttctgatgcaaatgtggcaatgcccttccatcagcagaggcaggcaaagctcccgagagtgaggaggagggatggtgttaccatggtaacgagatgaccagctgagtgtagatggagctaagcatctttctactgaagaacaggagtagctatncttagcctctacttgtacctgaggagtcacagccgatttacataaacccctcacttttcattaaaagcaaacatacaaaaggattgaggaaggcaaattttctctctcttcttgagctgtgacttctatctcttaaaaaaataaaagcaaatttaaaataataagagctaacgtctcctactggggaggaaattaagaacaaatgtctgggaagcgggtgctctttaacaccatttaggttttttgatttgttgtttctaattaagatattggtttctgctgagggcatgcgtaaggtaggttagattttaaaatacttgccagcctttg

SEQ ID NO: 3743 - DNA, 661 bp, Homo sapiens
  misc_feature [331]..[331]: Chromosome 9, SNP identification no. = rs16934264
  misc_feature [331]..[331]: allele = c, t
  misc_feature [331]..[331]: n is a, t, c or g
tccaaacttctcttgtttctgtgcatctccatgtcaagcaattctctcacactatggagggggtgttctgtaacattccctcctcattaggttcgtatgaaatggagataaacacagtgctgtcatcattggacttagagtgtggccagcatggtgcagagtggtctggaccgcacaaaacaaatcaaaatatggccccaggagacaacttgctggtggtagaaaaagcatggatgcttgcatttcgacagacctgcaccgtcacctaaacagctcagcccacgtgcaagcaactgctgaactactctgagccttttgcatccacagctanggacaagagaagttatgtaactcacaggcaggtgcagtgccctgggtggtgtttctcacatagtagatgttcaaggaacacctatcttcttccctctcctttgttctctgaaaacgagccatctcgcgtctagctgggggccaagccccattcctacaaaacaagttacaaacaaacaagtgagtgcagccacagcagagccgagtccagagcagggtgtcctcaccatccccaaggtccactgcagagttaatgtgtactgtcaaaggggtgctgtgtgctgtagggctgggggatccaacaccagcgggaactgttaggtctgttatc

SEQ ID NO: 3744 - DNA, 661 bp, Homo sapiens
  misc_feature [331]..[331]: Chromosome 9, SNP identification no. = rs12686718
  misc_feature [331]..[331]: allele = c, in linkage disequilibrium with rs16934264, respectively
  misc_feature [331]..[331]: n is a, t, c or g
ctttacaaaatggaagtaacatgtccatagaggtgtcccgggatccaggttggagtgtctagtgggggccacaagatgtagcccttaggaaactctgcctgcccttgtgtgccttcctcagggagagattcagctccgctagttggagcaattcctcctgcccacttccagaccccgcatttagctcttcattaaaagaaagtccattgaggggcttaaacacaaaactccctataatggtgaatactcagaattactttccacctgatactgcttcatttaattggactaaagcaggctcccctggctccagcctcccttgaaatcctgnccaaatttgcctggctcctgcgtgggcctgagtaaatatgcggcaggtgcgctgaggggttgcgagctgggcgcccatgaaccgtaatggttgctgcatgactgattccccagcccctccgccctcctgctaaatcccaggaccctccctgcttgtgcaaaaagcgggctccccagtgccgccttatgaagaagtggtagagcaatttcatttaatattgctagtgcttccattaacctgagtatattgctctccatcctcaatttaagactccctctttctcttgattatcgctgtatttcagagcacctgaatgtcctccccagacct

SEQ ID NO: 3745 - DNA, 661 bp, Homo sapiens
  misc_feature [331]..[331]: Chromosome 9, SNP identification no. = rs10746640
  misc_feature [331]..[331]: allele = a, in linkage disequilibrium with rs979468, respectively
  misc_feature [331]..[331]: n is a, t, c or g
ggtgaaaccccatctctactaaaaatacaaaaaattagccaggcgtggtggcgggcgcctgtagtcccagctactcaggaggctgaggcaggagaatggtgtgaacctaggaggtggaggccgcagtgaaccgagatcacgccactgtgctccagcctgggtgagagagcaagactccatctcaaaaaataaaaataaaaaaaaaataaatgaattagaagtctttgctcaaaaatggttagattttctatgtagtgatcccaaagaatcaacaacaataagaaaaacctcttggaactaataaacatttatagcaaggttgcagaatacntggttagtgtacaatagtcaattgctcataccaacaatgaacaattagaatttgaaactacaaagcacaatctcatttacattagcaccagaaataataaaataatttgataaaaagctaataaaatgtgcctgtgatctatacaagggaaattacaaatctctgatgcaagaaatcaaataaaatttaaataattggagagagagtccatgattatgaatagaaagacccaatatagttagggtattagttctttctcacttgatctatagtttcaacataatcacaatcaaaagctcagaaagttacaatgtggatgtcaacaaactg

SEQ ID NO: 3746 - DNA, 661 bp, Homo sapiens
  misc_feature [331]..[331]: Chromosome 9, SNP identification no. = rs7039874
  misc_feature [331]..[331]: allele = g, in linkage disequilibrium with rs979468, respectively
  misc_feature [331]..[331]: n is a, t, c or g
aataaatgaattagaagtctttgctcaaaaatggttagattttctatgtagtgatcccaaagaatcaacaacaataagaaaaacctcttggaactaataaacatttatagcaaggttgcagaatacatggttagtgtacaatagtcaattgctcataccaacaatgaacaattagaatttgaaactacaaagcacaatctcatttacattagcaccagaaataataaaataatttgataaaaagctaataaaatgtgcctgtgatctatacaagggaaattacaaatctctgatgcaagaaatcaaataaaatttaaataattggagaganagtccatgattatgaatagaaagacccaatatagttagggtattagttctttctcacttgatctatagtttcaacataatcacaatcaaaagctcagaaagttacaatgtggatgtcaacaaactgattttaaagcttatgtggaaagataaaagattcaaaatcaccaacacagtactaatgaggaagaacaaagttagatgactgactctccccaacttcagggcttcctatgcagctacaataagtaatatagtgtggcaaagaatgggcagctcaatggaacagaatagtggtcagaggggtttttagggcagtgaaactattcta

SEQ ID NO: 3747 - DNA, 661 bp, Homo sapiens
  misc_feature [331]..[331]: Chromosome 9, SNP identification no. = rs2196244
  misc_feature [331]..[331]: allele = g, in linkage disequilibrium with rs979468, respectively
  misc_feature [331]..[331]: n is a, t, c or g
ttctcaatctcacagctcaagacaactccaaggccaattttcttccgggcttaacttaataactacttggaataaggagggaagaaaggaacaatctattttcttccactcagagaagcaagtgtgcacgttcatgactgatttaacattttgtatttgggtgctgctctcagcataaaggtgatatagaaatgactacaaatttatgggaggacataaatagagatggcattttaaggtgtgatgagtaaaaaaccttcagcttttgaccaaagtcatttttaatgaaatattgactaatatttccttactaaaataagtaaaaatgcantgaatagacaagaaactaggctttgtccagcttaagccatccggctccacaagtatattcttcccacaaagaaatgtttatcacagttttgcagttacacactttggcagcttattaagaattctgtttgtttttcctttttttcctattatcctatttcttttataaacactttttttagtcatacacctttagactccaatttgtgaattgtttctcacaaatagatacagaaccattgccacgaaaacttaatttattagtttgaaagtctccaaaatataaaacaaatcaacaacataaagtaaatatgctataggaaagattgcc

SEQ ID NO: 3748 - DNA, 661 bp, Homo sapiens
  misc_feature [331]..[331]: Chromosome 9, SNP identification no. = rs979468
  misc_feature [331]..[331]: allele = g, c
  misc_feature [331]..[331]: n is a, t, c or g
attctttattatttcatttcattatccctcaaaaccattgaaatagatacaattactattcccatgttgcagatgagaaaaatgagggccagagaacttagctagttttccctcggtcatatctctgggattcaagcccagctaagtgattcatgccatgtgctcctagctagtccattcctgtatttccactgtgtggaaccagtgtgggtggtttctgtttccccagagcagatccttctcatcgctggcctccctacttcctagtttctgtgctctaattgtctctcacagacagaagagccgtgctgttactcattgggacatactnagaattacaaagagacagacattcatccccccaatgtctctgcttgctgtgtactttctcccagctttcccatgaacacaagtctagaaactactctgatttccttcctctcttattcttcttcaggaagtgcgaaaacatagggacaacagcgacttttataaatactgataaggaaaaaccactcatatagtgaaaaacaaaatgccaccttgccacttacaccattttctttccatcacttttgtaagactgttttctcccagggagtagagaagtggaataatgtttaaatgagaagccttcacaccttttctcaatctcacagct

SEQ ID NO: 3749 - DNA, 661 bp, Homo sapiens
  misc_feature [331]..[331]: Chromosome 9, SNP identification no. = rs10746643
  misc_feature [331]..[331]: allele = a, in linkage disequilibrium with rs979468, respectively
  misc_feature [331]..[331]: n is a, t, c or g
atagcatctctataataggcatatttaacaaaatgacattagtgctattcattttccttattatgcatatttgaggaatcaggccagagaagtgcaaaataatacatatggtgttatcacattgttactgagaatacaagagaaaaaactgtaccaagagcagcctgctctactaaggcgggaggcaaatgcactctgtgttccctcaaatcctcaactctcctgtactgtgttctatgcacagctgcaacacaatttcttatagggtgcattcaatactgtggcccatgacaaaggatgctgtgaggcttcctctacagcagtgattttnaaatgatggatgtgaccctatggtggataataatgtaaaatcagtgagagttgatcagcattgggaatgaagtagaataaaatagaaagcattgcagtgtgtctcaggtacattcttactgggaaatccctagtttctggctttggtgtaactatccaaatgacttggaataggcttatttccttaatggcataaacattatatatttatgacagctagatatgaatgagttgaccagacgttgaagatcaattatttgctaggtggtgattactgaaaaagagctgaggaacataaaaccggctaagaaactggagaaatgagaggggg

SEQ ID NO: 3750 - DNA, 661 bp, Homo sapiens
  misc_feature [331]..[331]: Chromosome 9, SNP identification no. = rs10867547
  misc_feature [331]..[331]: allele = c, in linkage disequilibrium with rs979468, respectively
  misc_feature [331]..[331]: n is a, t, c or g
tattgtgaatggtgccgcaataaacatacgtgtgcatatttctttatagcagcatgatttataatcctttgggtatatacccagtaatgggatggctgggtcaaatggtatttctagttctagatccctgaggaatcgccacactgacttccacaagggttgaactagtttaccgtcccaccaacagtacataagtgttcctatttctccacatcctctccagcacatgttgtttcctgactttttaatgactgccattctaactggtgtgagatggtgtctcattgtggttttgatttgcatttctctgatggccagtggtgatgagcantttttcttgtgtcttttggatgcataagtgtcttcttttgagaagtgtctgttcatatcctttgcccactttttgatggggtttttttgtttttttcttgtaaatttgttggagttcattatagattctggatattagccctttgtcagatgagtagattgcaaaaattttctcccattctgtaggttgcctgttcactctgatgttagtttcttttgctgtgcagaagctctttagtttaattagatcccatttgtcaattttggcttttgttgccattgcttttggtgttttagacatgaagtccttgcccatgcctatgtcctgaat

SEQ ID NO: 3751 - DNA, 661 bp, Homo sapiens
  misc_feature [331]..[331]: Chromosome 9, SNP identification no. = rs10746646
  misc_feature [331]..[331]: allele = g, in linkage disequilibrium with rs979468, respectively
  misc_feature [331]..[331]: n is a, t, c or g
gtgagtaatgccacagtgagcatggtagtgcagatatctctgaaatgttgatcttatttcctttggaaatgaatatagatatccatattccctacacgatttggggttttcagccagcacttctttaaataaactttctgccctttctctcttgtttttccttctgaaactcctataattataaaattcttacgcttgatgtcccataagttctttatgctttaattatttttttctttttgttcatctaattggttaatttcaaacggcctgtctttaggttcattaattctttctcgtgcataattgattctgctcttaatgatctcanttgagtcttccagttctattatggtattcttcagctctaggatttctggttcattgttatttcttattctatattacatttctcattttgttaatccatggtttttctaattttctttcattgactatctgggttcacttgtatctcattgagcttctttaagataattattttgaattctcttttagacaatccatagatctctatttccttggggttggttactacagcttattagtaactttattagctatatcagtttctttgagtgatgtcatatttgcttgattcttttttatctatgtagctttgcattggtatctatgcatt

SEQ ID NO: 3752 - DNA, 661 bp, Homo sapiens
  misc_feature [331]..[331]: Chromosome 9, SNP identification no. = rs1369185
  misc_feature [331]..[331]: allele = c, in linkage disequilibrium with rs979468, respectively
  misc_feature [331]..[331]: n is a, t, c or g
atatgtgtatgttgtgaatattactaagaaaaattctttgtgtgtatacatggaaatacagataacagtggttatctgtgcagtggaatgtaaacaattttttattttcatataataagcagatattagttttctaatcagtaacaaataaagctaattttttaagaaagttagaataatttttacctttctctgtgtttctatgggttttgtgaggatcagttgagataatgaatataaaagtaacttggaaactgtgaattgttctgcaagtgtgtattgttggcgatgttatattccaaatttgaagtccttcaagagttaagactanttctctgtccattacattgcattgcagctgtgtaaaaatattttcttcatttggaaagcacccctaaatcccttttacaagttagaaaaaaagcacaacacatttccttcacacctcaaatatcacagatggaaaactgtcattttgcctcactatttcctgtgctaaaatgataaaaaaaaataatgtggcaaatggctaatctatgccttaagaaaatttaaaattttaactatttctgcttgtaagtgactatttgtgaatgaattaatttttgcccagtaacaatttcttaatgaattgaatgtgcaaatgtcaatgaaagtttat

SEQ ID NO: 3753 - DNA, 661 bp, Homo sapiens
  misc_feature [331]..[331]: Chromosome 9, SNP identification no. = rs10081667
  misc_feature [331]..[331]: allele = g, in linkage disequilibrium with rs979468, respectively
  misc_feature [331]..[331]: n is a, t, c or g
aaatggccagctataatttatcaactgtataacacacaggaactgaaaatgtttaaaaacaaactcatgatagtcctctaccaaacctccatctattctgatattatgttagaagttttagggtcacggtaaatatctcaatttttcaaacttcaatatcctcatttgtaaaatgctgacaattaatatttttctctttatagagaattatgaggcttaaatggaatatggatgtaaagagcttagcatagtgcctggtacagtgttagctcttagtacgcattacatagtggaaatagtggtggaggttggtgatctccatatcttctanttttttttcaaatcgttgtctgcttctttatttgcttctgaatctagaatgtgaacccacatatacaagaaacctattgtagtcatctttattcctggcatagtgattatctgctgtttgttgaatggctggattcataaaaattgcctacttttattgtactctataaccatacacatttgatatcaaacttcttcttttatgctctttattttgagcttgacgactatcctgtgagtcaagtaaagcagatattaccatcttcaatatccaaggagagaagatgagaggttaagtgacttgcctaagcttacataacaagtaaatggt

SEQ ID NO: 3754 - DNA, 661 bp, Homo sapiens
  misc_feature [331]..[331]: Chromosome 9, SNP identification no. = rs10081668
  misc_feature [331]..[331]: allele = g, in linkage disequilibrium with rs979468, respectively
  misc_feature [331]..[331]: n is a, t, c or g
tatcaactgtataacacacaggaactgaaaatgtttaaaaacaaactcatgatagtcctctaccaaacctccatctattctgatattatgttagaagttttagggtcacggtaaatatctcaatttttcaaacttcaatatcctcatttgtaaaatgctgacaattaatatttttctctttatagagaattatgaggcttaaatggaatatggatgtaaagagcttagcatagtgcctggtacagtgttagctcttagtacgcattacatagtggaaatagtggtggaggttggtgatctccatatcttctagttttttttcaaatcgttntctgcttctttatttgcttctgaatctagaatgtgaacccacatatacaagaaacctattgtagtcatctttattcctggcatagtgattatctgctgtttgttgaatggctggattcataaaaattgcctacttttattgtactctataaccatacacatttgatatcaaacttcttcttttatgctctttattttgagcttgacgactatcctgtgagtcaagtaaagcagatattaccatcttcaatatccaaggagagaagatgagaggttaagtgacttgcctaagcttacataacaagtaaatggtgggtgttgaaaataattt

SEQ ID NO: 3755 - DNA, 661 bp, Homo sapiens
  misc_feature [331]..[331]: Chromosome 9, SNP identification no. = rs1434835
  misc_feature [331]..[331]: allele = g, in linkage disequilibrium with rs979468, respectively
  misc_feature [331]..[331]: n is a, t, c or g
atatggatgtaaagagcttagcatagtgcctggtacagtgttagctcttagtacgcattacatagtggaaatagtggtggaggttggtgatctccatatcttctagttttttttcaaatcgttgtctgcttctttatttgcttctgaatctagaatgtgaacccacatatacaagaaacctattgtagtcatctttattcctggcatagtgattatctgctgtttgttgaatggctggattcataaaaattgcctacttttattgtactctataaccatacacatttgatatcaaacttcttcttttatgctctttattttgagcttgacnactatcctgtgagtcaagtaaagcagatattaccatcttcaatatccaaggagagaagatgagaggttaagtgacttgcctaagcttacataacaagtaaatggtgggtgttgaaaataatttctgaatctgagtatattatgtgttcctcatagcattaaaaacacaatcatctttctgccaattatacctttatttaattcaaattggatctatatataaggacatgagagaaacagctggaacagaaataagagtgagtatacttttagaaagatacagttaatgatttcctcaataatgattttatcttaagtccaaatgggctgt

SEQ ID NO: 3756 - DNA, 661 bp, Homo sapiens
  misc_feature [331]..[331]: Chromosome 9, SNP identification no. = rs978282
  misc_feature [331]..[331]: allele = a, in linkage disequilibrium with rs979468, respectively
  misc_feature [331]..[331]: n is a, t, c or g
tgtactctataaccatacacatttgatatcaaacttcttcttttatgctctttattttgagcttgacgactatcctgtgagtcaagtaaagcagatattaccatcttcaatatccaaggagagaagatgagaggttaagtgacttgcctaagcttacataacaagtaaatggtgggtgttgaaaataatttctgaatctgagtatattatgtgttcctcatagcattaaaaacacaatcatctttctgccaattatacctttatttaattcaaattggatctatatataaggacatgagagaaacagctggaacagaaataagagtgagtntacttttagaaagatacagttaatgatttcctcaataatgattttatcttaagtccaaatgggctgtgttcgtccataaaaattggcttgccatgaaaactgagctccatacaaagtgaaaagactgccaaagccttctaggttgatgactgatctccttcagagccagtataaattattttaagctccaagagcatgattatataataatgttcccacttgtcaaagctacatacatgtatgtctctcataaaggaaattaaaaatgagagttttgagtagatcagagaatttagtaatctgcctctgattttttaatgtaacgatgcc

SEQ ID NO: 3757 - DNA, 661 bp, Homo sapiens
  misc_feature [331]..[331]: Chromosome 9, SNP identification no. = rs4877579
  misc_feature [331]..[331]: allele = a, in linkage disequilibrium with rs979468, respectively
  misc_feature [331]..[331]: n is a, t, c or g
aacagaataccacagactgggtaattataaagaaaataaatgcatttctcatagttctggaggctgggatgtccaaaagcatggtgtcagcatctggcaagagtctgcatgctgtgtcatcccagggcagaaggtggaagggcaagagagggcaagattgagacagtgagaggatggagactgaattcatccttttatctggaacccactccctttataactaactcactcctgaaataatggcatttttatctatccatcatggcagggccttcataacctaatcacgtcttaagggtttcacctcttaatactgttacaatggcaatgncattttaacatgagttttgcatagcattccacccctggccctccaaaattcatgtccttctcgcatagaaaatacatacattttatttcaatagccccaaaaatattaactcatttcaacatcagctcaaaattccagagtccagagcctaatctaaatcagatatgggtgaaaatcaaggtacaattcatcctgagggaaattcctctccagccgtgagcctgtaaaaccaagataaatgatgttcttccaaaatagaatgctggataaggcataagatagatatttctaccccaaaacggaaaaataggcaagaagggtctcaagtaa

SEQ ID NO: 3758 - DNA, 661 bp, Homo sapiens
  misc_feature [331]..[331]: Chromosome 9, SNP identification no. = rs7032004
  misc_feature [331]..[331]: allele = g, in linkage disequilibrium with rs979468, respectively
  misc_feature [331]..[331]: n is a, t, c or g
ctctgttataaataattcaagggcacgtcctgcaaaatccaagggaaaagccccacagctcattataacagtgagttggtagactgctagatccttaaatcactggaaaatgttttgcaacagctaagaattttttctcctctgcagtagtagatatcatagtcactatgaggtgacaagtggttcccctgaggccaggaggacagcaatcaatagaggagggtagcctgggccacgactctctcagttgatacagaagcattgtgtacagatacaatgctcagaataaatcatcaggaaaaagagaagcctcttcaagacaggaaaagangtacctcccagaaaacatcttatggaacagttagtttgatttagttgtctctgttttaacttagctttttcatattagttaatagtccgggtccgctctacttatatagccttgcttccagatccttccctaagaatgcttctgttttctcactttatcacctgtagccctcacatgggctccacaattttatgtgctcttctcattttctacctttcaaatcttttattaatttttattattaatgcagatgtctttccattcttcggaaatcttacagcacatttagtgcataccagagtatggttacttatatttggtgcctgcatc

SEQ ID NO: 3759 - DNA, 661 bp, Homo sapiens
  misc_feature [331]..[331]: Chromosome 9, SNP identification no. = rs2378482
  misc_feature [331]..[331]: allele = a, in linkage disequilibrium with rs979468, respectively
  misc_feature [331]..[331]: n is a, t, c or g
atgggaaaacccaacccaggtgcaggatgaagccgaggacctaaagaaaacctggaagcactatgaagcaggtataaatccagcctgtctgttctaattcctgagaaggaagggccaaaagaacggagagaaaacagaaacagttatttgatggatgttatacatttaggttctgtaattacatgggaagttgatttatcacggtgtccttgcatcagtgaaacgtcagaggcgagacacatgtgtggcctcatcagaggagaaattgtttttaggaagctctggctttgcaatctggaaacgacaagaataacatgaggttaacgttatnactttctgagaactttcaaagcaattaatgcatgaaattagacatgtaaagaagtggagaaagggagaaattcaagtacgataagcaaaactggcaacttggagaatcaaaataatctgtaagtgtttctgagactgtttttgcttaactcagaggccaaacattcttgctaactcagaggccaaacattcttgctttcactctactaatacacagtaggctttctcatctggcatatgttcactccatgtaccacagataaagattcttaaaatgtttcatgatttttcttgtccttcacaagatgttaatgcctggactctcttgctt

SEQ ID NO: 3760 - DNA, 661 bp, Homo sapiens
  misc_feature [331]..[331]: Chromosome 9, SNP identification no. = rs7047415
  misc_feature [331]..[331]: allele = c, t
  misc_feature [331]..[331]: n is a, t, c or g
agccggaataattaaacacagtattttgttcaataactttgaaaaaaatttccttcctccctccctttcctcctttgttttgtgacacttaacgtatagcagctatatcatagcttatagaatgatgaaggaagacagtgctagttctaagatacatgcactttataaaaccatcagcataactaaatctcaatgcaggtcatggtgaggttatggccaaccattcattgagtcaatgagtattcaatgcttactatgagccagacaccataatgtctgtggacattgattcattctagacaccaatcatttgggaagcaacttagtttcncaatgaaagctgtaacaaggcctgctgatacacaatctttggggtggcactgtggctgaccttgcctgattagaggtcctttcgggaatttggtaactaagcaccttggatgggggccagggggcctgtgctagaatgcatcttcctctgcagggtttgtgctgacagccacatgccattactggactcagaccacctgcccctagtcattgcacaatcacctcatgattcaacctcgcagatgtgtttcatgcttggcaaaatctgaagcgagcaaaccatgcagactctgtctctctctttgcctttccagttagatgcaacccagtt

SEQ ID NO: 3761 - DNA, 661 bp, Homo sapiens
  misc_feature [331]..[331]: Chromosome 9, SNP identification no. = rs7029315
  misc_feature [331]..[331]: allele = g, in linkage disequilibrium with rs7047415, respectively
  misc_feature [331]..[331]: n is a, t, c or g
agagaatgagaacattttgcaaattcactgcaaacgtaagttttcctttaatcctgagctacagaacttgtagcagctatttttgagtgtacaccacgttcaggctcctggaagaaaggaaccttaaacatgtaattagttagagagaaaacacagaaacacacagaacctcctgtaagggtgaacatggtattcatgggtggatggagttgttaaaacattttagaacagctgctggaatttaggttcaggacttcactgtgtgtgtgtgtgtgtgtgtgtgttttaaacctttgaagagttttgtagggactgaaaatatttgaggatnaatgtctaaatgcaaggcttttggctgaaacagaaaaattgtcattcagaatccaggtttgacttggacagggagtgacttaaaaaaaacaaggagacagacatttatggaaatggtgtttactcaaggctgaagagaaggtttctgtctagcctaaaagtgatgtcacacaaattaagaagggaaaccctgagaggacgcattgggcagtgtttcccaaagtgtgttcatagaacacaagtctcagaagatgcttggtgacagaggggttctgtggtcaactgagtttaggaagctgcatgtgaacttcacctcttgagatggacagtg

SEQ ID NO: 3762 - DNA, 661 bp, Homo sapiens
  misc_feature [331]..[331]: Chromosome 9, SNP identification no. = rs16910240
  misc_feature [331]..[331]: allele = c, in linkage disequilibrium with rs7047415, respectively
  misc_feature [331]..[331]: n is a, t, c or g
gaacttgtagcagctatttttgagtgtacaccacgttcaggctcctggaagaaaggaaccttaaacatgtaattagttagagagaaaacacagaaacacacagaacctcctgtaagggtgaacatggtattcatgggtggatggagttgttaaaacattttagaacagctgctggaatttaggttcaggacttcactgtgtgtgtgtgtgtgtgtgtgtgttttaaacctttgaagagttttgtagggactgaaaatatttgaggatgaatgtctaaatgcaaggcttttggctgaaacagaaaaattgtcattcagaatccaggtttganttggacagggagtgacttaaaaaaaacaaggagacagacatttatggaaatggtgtttactcaaggctgaagagaaggtttctgtctagcctaaaagtgatgtcacacaaattaagaagggaaaccctgagaggacgcattgggcagtgtttcccaaagtgtgttcatagaacacaagtctcagaagatgcttggtgacagaggggttctgtggtcaactgagtttaggaagctgcatgtgaacttcacctcttgagatggacagtgcacatacacatggaaaggcactcagaagtcccaaagtgaaaaactatgtcatggcggacccca

SEQ ID NO: 3763 - DNA, 661 bp, Homo sapiens
  misc_feature [331]..[331]: Chromosome 9, SNP identification no. = rs12115640
  misc_feature [331]..[331]: allele = a, in linkage disequilibrium with rs957235, respectively
  misc_feature [331]..[331]: n is a, t, c or g
tgaaggaagagcatggccagtgtcacagccatcttattggaaaaactgtgatttttgtatggcactttaagcataacactcagtacccataccagtaccaagatttgaagaaggtgccactcacaaagacatccttaaacctcaaacaaatcagtagccttggttttggggtggggggtatgggggtggcagcaccaccacccataccttgattaaacttgtgactccaaaccagagacccctctctcagccctctaacccagtatttctcagtatggatgctatggatatttggggcaggacaggtccttcactgtgcaggactgtctcntgtactgtagaacaattagaatccctgccccctgcctgctaattgatgtcaatatcccctatcattgtgacatttgaagcaacctcaaacttattgcaaatatctccagcctgagaacaccatgtggggtcatcagggaccagcattgtagacaacttcttgtatcagggttttgtgtgcttattcatgaaaaggcatactattttgtggattgaatgaggagcactgtgcattacatagcagccatgttggcaggaaaatcggcatctttttttttttttttttttttaatgaagttcagagatgtgaagaaacgtgtgcaaggtaaca

SEQ ID NO: 3764 - DNA, 661 bp, Homo sapiens
  misc_feature [331]..[331]: Chromosome 9, SNP identification no. = rs12380343
  misc_feature [331]..[331]: allele = c, in linkage disequilibrium with rs957235, respectively
  misc_feature [331]..[331]: n is a, t, c or g
ttgatgtcaatatcccctatcattgtgacatttgaagcaacctcaaacttattgcaaatatctccagcctgagaacaccatgtggggtcatcagggaccagcattgtagacaacttcttgtatcagggttttgtgtgcttattcatgaaaaggcatactattttgtggattgaatgaggagcactgtgcattacatagcagccatgttggcaggaaaatcggcatctttttttttttttttttttttaatgaagttcagagatgtgaagaaacgtgtgcaaggtaacacagttgaaaagcgaagggatcagaataaaagcccaggtcttcnggttccttctacacatatacaataatgtaactatcagcaactatcagcaattctaagttcacccagctcatttcagtgtcagtaaaagcttttgacataaagaggggtataatagggggatatgaactaatcctatataatttaacattaataatagtagcagctttaacaatagctaacagttgttaagtgtgttcaaagtgccagatactgttctaaagagctaaccaatatttcctgtttacacttacttctacaatgtagatataatattaccacccttttaaaaattagggaactaagtcttagaaaagtaacagggtcatgcag

SEQ ID NO: 3765 - DNA, 661 bp, Homo sapiens
  misc_feature [331]..[331]: Chromosome 9, SNP identification no. = rs10979478
  misc_feature [331]..[331]: allele = c, in linkage disequilibrium with rs957235, respectively
  misc_feature [331]..[331]: n is a, t, c or g
agcccatttattcaacatgagttttgacaaagccaatttttcaattactattatctatttggaacggtttcctggagtgaacacaaattctccatttatgcatagttggcaactagaaacgaagaatgagaaaataacatcatgcttaatgtaagaaaaggaaaggaatcgatcttttttaaatgtaaccatttttctgattatgaaaacatactcatgataaaaagttttgaatggacataatcccattacttccatcatgtaggtacatttcttactagttcttttcctatgcacatgtttttaaaacaaaattgggattctattatanatgcaatttcatctgattttaaaaactcaatattataaatacaaaacattttcccaagctgttagaaatttttcagaaacagcatttgtaatggctgcaaaatgttgcatattttgggcatgccatgatttactgaacccttcttctgtggggggacaaacaacaaacctatgtgacaaagaaatgacagaagccaacctgggcacgatggctcaggcctgtaatcccagcactttgggaggctgaggcgggcagatcatgaggtcaggagattgagaccattctagctaacacggtgaaaccccgtctctactaaaaatacaaaaaatt

SEQ ID NO: 3766 - DNA, 661 bp, Homo sapiens
  misc_feature [331]..[331]: Chromosome 9, SNP identification no. = rs10979479
  misc_feature [331]..[331]: allele = c, in linkage disequilibrium with rs957235, respectively
  misc_feature [331]..[331]: n is a, t, c or g
cgaaactcgctcatttgagcataattactacatgctggtactcacatatctcatgaagtacgatataatacaaatcaagtttacagatgagaaaacactagctcagtgactttaaggaagttgcccaagatcacacaggtagtagatcagtggtcaatctcaagccttctgactctaaagccagttctccttccacagtgccagccttttcaggttaccccataatcctactcctggggattcatgctgagaaattttacttgctaattttaaaatcaaaactaaaaaagtgttcgctgtgttgttcattgtgattccaaaaactggaagnaagctaaatatcaattataaaggaaaaatgaagcaaactgtgacaatattattcaacaacaaaaattaaaatattatagactgtagcaacatagaaggttttcatgactgaaaaatgggtatatatattatgaacataactgtgttaaattatgtaaatcacagtaggcaagacaccaggcaaaatgaaaatactatttacagggaagtagaattctagatacattttttacaaatttttttaataccattttgatatcttaacgacgtcaaacaagtaagtttataatatccctgctggtttttcagtgccagatgtgggtgctttccc

SEQ ID NO: 3767 - DNA, 661 bp, Homo sapiens
  misc_feature [331]..[331]: Chromosome 9, SNP identification no. = rs10448249
  misc_feature [331]..[331]: allele = g, in linkage disequilibrium with rs957235, respectively
  misc_feature [331]..[331]: n is a, t, c or g
gcaagaaaaagggaactgccaggcacggtggctcacgcctgtaatcccagcactttgggaggccaaggtgggcgtatcacgaggtcaggagatctagaccatcctggctaacatgctgaaaccccgtctctactaaaaatacaataacttagccgggcgtggtggtgggcacctgtagtcgcagctactcgggaggctgaggcaggagaatggcgtgaacccaggaggcggagcttgcagtgagcccagatctcgccactgcacttccagcctgggcaacagagcgagactctgtctcaagaaaaagaaaaaagaaaaataaagggaaccntgggtgtttactgggcagcatcaaatgagcaaagatagcagaattgcaggttaggaaacctgactgtcactaatttgccaagtagcaaattgagtaaaccattctcttctttgggcctcagtttccccatttacaatgtgaagagattggactgaagaaccttccagcaatggcccttgaagcagtggtgtgctcaagtaatttttactggcttgtgaaaaccaattgttaaattggggggaattttgtgaggctggagttaagcacatccattagaaaaaataaatataaatatgcattttaaaattaaaaactagatgtaaacataca

SEQ ID NO: 3768 - DNA, 661 bp, Homo sapiens
  misc_feature [331]..[331]: Chromosome 9, SNP identification no. = rs10816722
  misc_feature [331]..[331]: allele = c, in linkage disequilibrium with rs957235, respectively
  misc_feature [331]..[331]: n is a, t, c or g
gctgtttctatcttcgctgctgccctcggtagtaacagagcagctgaggtctgctcagaagtcgccagggacagacactgtacaaaggggtcacagctgcaagggagacgaagggaaaggcagccctgtgtggagcagccacatctgctattctggggtggagtgagttggggcttctcctaaaatagaacaataacgtgcaggtctagactaagcagcaattttggttttagggaaagctgatacccagcaggatgagaataactctgagaaagtttgttttcagcaatttgggctcaattaggcaggaaaagtgcctggtaagaaacanagatacaaccaaaaccaggaggaggcctttggggcatttacgaggggaccctcccaggaattcccagacagcaagcagcagcaatgttgcctctgctgctgaagaaacgagtcgcagccttaactccggtggaagaagtggtctctgtgccctatccctctcctggaccaaaggaaaatccaccccggacacatacactgcctctcacccgcccgctctgcttctcccagctgaccgtcgttaggaaaacagacggaaaccaggaagaagtcgtactgttcccaatccccagttgtctaatccaaacaacacaaaatactggggaaggag

SEQ ID NO: 3769 - DNA, 661 bp, Homo sapiens
  misc_feature [331]..[331]: Chromosome 9, SNP identification no. = rs10979483
  misc_feature [331]..[331]: allele = g, in linkage disequilibrium with rs957235, respectively
  misc_feature [331]..[331]: n is a, t, c or g
gctgctgaagaaacgagtcgcagccttaactccggtggaagaagtggtctctgtgccctatccctctcctggaccaaaggaaaatccaccccggacacatacactgcctctcacccgcccgctctgcttctcccagctgaccgtcgttaggaaaacagacggaaaccaggaagaagtcgtactgttcccaatccccagttgtctaatccaaacaacacaaaatactggggaaggaggggacaagagagcaaggtttggtgggggagagagatgcacacagaagtggttatggacagctgcttaggaaaagggatcctttaactaaccctcnaaggaataagcaaagaatgaaaggaaagggcatttaaggagcacaaaaatgctagatgtggctgttacacgtcaaggcattctaactcattagacatcagagaaattcaagttaagaaccacagtgagaggcaagaagccacaaaagaacattacttcccttctatcaacaagaaaaaaagccagacaatagacagtcctaacttcctttaacccatcagagagccgagattacaaggcaatcaggagaactgaattccagagtgacaagcccctccatagagacagaatatacatactctcccacctttgccagagcctctttggagaa

SEQ ID NO: 3770 - DNA, 661 bp, Homo sapiens
  misc_feature [331]..[331]: Chromosome 9, SNP identification no. = rs7870428
  misc_feature [331]..[331]: allele = g, in linkage disequilibrium with rs957235, respectively
  misc_feature [331]..[331]: n is a, t, c or g
gcacacagtaaagtctgacataatccacttacaaaggagattaaggatgctgatgagctcacacaggcaactccctgatgtactcacggatggtacaactgagccccaggagccaaataagaagagaaggtgcatttcacaaatgcacaccagggagataaatccatgccctgtagagaggtgcaccatgcctcagcaacaaccagtccctgaataaaacttcaaatggactgagaggctgtgagccagaccctgcagttctggctgcacatacatctctgtagaatggagactacctttgagatggggggaagggcttctcagatgaggnacatttgagctgagccgaaagaatgagtcacttgccaggcagtagttcggagtggggcgtggtattccacacaaggggaacagcatgagaaaaggggctggctggcatggggcagggagacttggagcagtctggtgtgactgggaagtacgacatgctgggggaagtaggggaaattgaaatcagtggagggcttgcctgttatgaagaattcggcctttaagcatgagcagttttgaaagcaccggtgtgacatgggattttagaaagatgactcaagtggccctgtgcgagcagatacattgcagaggcgagcctctggtctgagag

SEQ ID NO: 3771 - DNA, 661 bp, Homo sapiens
  misc_feature [331]..[331]: Chromosome 9, SNP identification no. = rs6477681
  misc_feature [331]..[331]: allele = c, in linkage disequilibrium with rs957235, respectively
  misc_feature [331]..[331]: n is a, t, c or g
tcacacaggcaactccctgatgtactcacggatggtacaactgagccccaggagccaaataagaagagaaggtgcatttcacaaatgcacaccagggagataaatccatgccctgtagagaggtgcaccatgcctcagcaacaaccagtccctgaataaaacttcaaatggactgagaggctgtgagccagaccctgcagttctggctgcacatacatctctgtagaatggagactacctttgagatggggggaagggcttctcagatgagggacatttgagctgagccgaaagaatgagtcacttgccaggcagtagttcggagtggggngtggtattccacacaaggggaacagcatgagaaaaggggctggctggcatggggcagggagacttggagcagtctggtgtgactgggaagtacgacatgctgggggaagtaggggaaattgaaatcagtggagggcttgcctgttatgaagaattcggcctttaagcatgagcagttttgaaagcaccggtgtgacatgggattttagaaagatgactcaagtggccctgtgcgagcagatacattgcagaggcgagcctctggtctgagagaggtgaggagccccctgcctcctctcatcctcctcattaatgagaatgagacaaagct

SEQ ID NO: 3772 - DNA, 661 bp, Homo sapiens
  misc_feature [331]..[331]: Chromosome 9, SNP identification no. = rs10118169
  misc_feature [331]..[331]: allele = g, in linkage disequilibrium with rs957235, respectively
  misc_feature [331]..[331]: n is a, t, c or g
acgggacttgtcagaacaagcacctggctttggctgatgaaaaaaataagcaagcacagttttaattgcacacagttttaagaggggtgggggctcccagcttgaggctgcaagatgcaggccttcctgagtctatacagtgaaccatcagtgggccacaagggtgccttgagaaagagccagtgctgagcccagtgctgggtagtcgggatgtctggcttatccaacagaggggaagcagcctgatggtgtctatatggaggactgtctaaggagcctcctggaaagggatatatcctaagggaaggaagagcctattaggctctaaggntgggatacaatctcttaattctgagttcagggaggtatctgcctatccaatttgtctcttgactcagcttccattgggttcatgtcagagtgcccagtggagcaagaggctataagtaaaaacagaaacaccttgggactggggcagccctcctttggggaccctctaacagaatgtggcaaagatgaaggaaacagtcttcctccacacacctgacacctgagggcttgggatggcaacggtaaggaacttcaggagaattacagccatttacagaccagcacagagcagaacagcatttcagccatacctactgtcgtagtctgttca

SEQ ID NO: 3773 - DNA, 661 bp, Homo sapiens
  misc_feature [331]..[331]: Chromosome 9, SNP identification no. = rs1339877
  misc_feature [331]..[331]: allele = g, in linkage disequilibrium with rs957235, respectively
  misc_feature [331]..[331]: n is a, t, c or g
tacagtgaaccatcagtgggccacaagggtgccttgagaaagagccagtgctgagcccagtgctgggtagtcgggatgtctggcttatccaacagaggggaagcagcctgatggtgtctatatggaggactgtctaaggagcctcctggaaagggatatatcctaagggaaggaagagcctattaggctctaagggtgggatacaatctcttaattctgagttcagggaggtatctgcctatccaatttgtctcttgactcagcttccattgggttcatgtcagagtgcccagtggagcaagaggctataagtaaaaacagaaacaccttnggactggggcagccctcctttggggaccctctaacagaatgtggcaaagatgaaggaaacagtcttcctccacacacctgacacctgagggcttgggatggcaacggtaaggaacttcaggagaattacagccatttacagaccagcacagagcagaacagcatttcagccatacctactgtcgtagtctgttcaggctactataacaaaaatgccatgagccaggtggcttataaataacaattatttctcacagctctggaggttgggaagtccaagatcaaggtgcccgcagagtcaatgtctggtgagggcctgtttgcttcctca

SEQ ID NO: 3774 - DNA, 661 bp, Homo sapiens
  misc_feature [331]..[331]: Chromosome 9, SNP identification no. = rs10979489
  misc_feature [331]..[331]: allele = g, in linkage disequilibrium with rs957235, respectively
  misc_feature [331]..[331]: n is a, t, c or g
agcaccttctgtgttcttacatggtagaaggggtgagggtctctctagagcctcttttataagggcactaataccattcatgaggactcccttctcatgactaatcacctcccaaaggccccagcccctaatactttcaccttgggagttaggattgcaacctatgaatttgagagtggggcacaaacagtccacagcacctgccctacagcagcaaagcccaccagcgagacagccacaccctgcaatcctctatggtggcctggtatggacatgggaacagcagacacactctgagctcatgggaaacatgccttaaagagttgctggnggcccagctaaaacctctgcatgagcggtcagggccaaggatttgtgtcacatgctcagtgcaaaggcagcactgtctcctgaagttctcatttgtcaagttctgaacgactgttgtcaatagaatgaaataccaataatcttgagacagtcaaatgttaaagccaaattagaatttcagtaaagcaggcaaaatactttcaagactgcaccctctaccacaatttgacattatctcctttgagcataataagccagagtggcagatatttgtgtgatgattctcccagtgttcctactgttccctgttatgtaaatgcttccaaatgcc

SEQ ID NO: 3775 - DNA, 661 bp, Homo sapiens
  misc_feature [331]..[331]: Chromosome 9, SNP identification no. = rs9299160
  misc_feature [331]..[331]: allele = a, in linkage disequilibrium with rs957235, respectively
  misc_feature [331]..[331]: n is a, t, c or g
ggtggcctggtatggacatgggaacagcagacacactctgagctcatgggaaacatgccttaaagagttgctgggggcccagctaaaacctctgcatgagcggtcagggccaaggatttgtgtcacatgctcagtgcaaaggcagcactgtctcctgaagttctcatttgtcaagttctgaacgactgttgtcaatagaatgaaataccaataatcttgagacagtcaaatgttaaagccaaattagaatttcagtaaagcaggcaaaatactttcaagactgcaccctctaccacaatttgacattatctcctttgagcataataagccngagtggcagatatttgtgtgatgattctcccagtgttcctactgttccctgttatgtaaatgcttccaaatgcctctcttatttacctacatcccttcttaggaaccaatctggcctatatgcaaacatttagataatttgggattttcaagcacatggtcatgattcatcttagaataacaagtgtcaagaccaaggccttggacatgatagcagaagagattttgtttaacgggttgccatgatgggggaagatcaagagactgaaagccatctagaagtgattgtcatctgagctattataaagtctgtgaatatatccaatatccc

SEQ ID NO: 3776 - DNA, 661 bp, Homo sapiens
  misc_feature [331]..[331]: Chromosome 9, SNP identification no. = rs10979493
  misc_feature [331]..[331]: allele = c, in linkage disequilibrium with rs957235, respectively
  misc_feature [331]..[331]: n is a, t, c or g
actgctcattatacactaattataatgcattagcatcctaaaagacactcccaccagcaccatgaccatttacaaatgctgtggcaacattaagaagttaccccatatagtctaagaaggggaggaccctcacttctagaaaatctctgtccctttcccagaaaactcatgaataatctaccccttgtttaacatataagaaatatctataagtgtattcagtcaagcagtccatgccactgctatacctatggagtagccattctttaagaaagtgaagctttcttaataaacttgctttcgctttactctatgggcttgccccaaattnattctttcaagaggtccaagaatgttctcttgggatctggatcaggactcctttccggtaacactctcactctcatgttggctttatgtattttcttcatggtgttataactatatgatcttgtctatgtctgtgtttatttattttctgtctcctctagaatttaagcaccaagagacaacaagggcagtacccatcttgttgcatgctgtatccctagtgtctataacagtgcctgacaaagaagagttaaccaggaaagagtgcacaaatgaatggcaacttttaccccagtcttgtcctgaattttctgcatagttagaatgtctc

SEQ ID NO: 3777 - DNA, 661 bp, Homo sapiens
  misc_feature [331]..[331]: Chromosome 9, SNP identification no. = rs4490911
  misc_feature [331]..[331]: allele = g, in linkage disequilibrium with rs957235, respectively
  misc_feature [331]..[331]: n is a, t, c or g
atctaccccttgtttaacatataagaaatatctataagtgtattcagtcaagcagtccatgccactgctatacctatggagtagccattctttaagaaagtgaagctttcttaataaacttgctttcgctttactctatgggcttgccccaaattcattctttcaagaggtccaagaatgttctcttgggatctggatcaggactcctttccggtaacactctcactctcatgttggctttatgtattttcttcatggtgttataactatatgatcttgtctatgtctgtgtttatttattttctgtctcctctagaatttaagcaccaanagacaacaagggcagtacccatcttgttgcatgctgtatccctagtgtctataacagtgcctgacaaagaagagttaaccaggaaagagtgcacaaatgaatggcaacttttaccccagtcttgtcctgaattttctgcatagttagaatgtctctgaatgaaggatgatgaggtctccttttggaggtcacttaagccagggattctcaaggtctttgaggccacaatacattctggtcagtgaaagatcatacatctcttttattcctggtacagcaacacacactctgccctggagtccctcggtcctgcatgtgtgaccagctggg

SEQ ID NO: 3778 - DNA, 661 bp, Homo sapiens
  misc_feature [331]..[331]: Chromosome 9, SNP identification no. = rs7869174
  misc_feature [331]..[331]: allele = g, in linkage disequilibrium with rs957235, respectively
  misc_feature [331]..[331]: n is a, t, c or g
caagctatatacttgcagtctttttgtttttctgtatgtatattttactttaagagcttttcaaatatatggcaagcctagctgatacagtggtagaggcaggaggcagaaaaattctaggcagacagggtcaggtccatggcaaaaccccaactttgagctgaaaagcctgaaacccacagcccaaaatgagaacttccatccctgtgcaccctctctctcctgattggttctttctgaataatgtctttttaccaatcaaatgttgccttttccaaaactacctacagcccaccccaccccaatcctgtgcctataaagatcccatatncagctggcagagagaagcagctggacatcaggtagaggcaactttgagacagtggctgggtgaggcaacctgacttcagaagagagaggcagagagatggcttgacttcaggggagagagaccttcccttcccatcccctttccagctcccttctctactgacagccactttcatcactcaataaaattctccatattcgacatccttcaattcatcctcattcctcttgggcaccagtcaagaattcaggatgtaccaggtatgagtacccaaaaatgctgtaatattggcccttcaccctcactggcagaaggcagccaccccatgca

SEQ ID NO: 3779 - DNA, 661 bp, Homo sapiens
  misc_feature [331]..[331]: Chromosome 9, SNP identification no. = rs7470529
  misc_feature [331]..[331]: allele = c, in linkage disequilibrium with rs957235, respectively
  misc_feature [331]..[331]: n is a, t, c or g
gcaactgaaagcatctggctgaggccatgccccattgttgccagaagacccctagacttgaccctgtccccaactgcccgttagggtgtcagccatgacccccagacttttctgtgctatttttacttccttctttcatggctcctatctcttcttttataatgttaagggtgttgctgcaaattgcagaaacgtttaggtggaatgagcgtttggcccaaccatcagatatgcaattcagaacaatgtgatttccatctgttcttagaggttccatccccactcccaccacaacagctgcaggtacacagtggctcccctccccgctccnagctggggtgcttggatgtgtctgtagcatgcatgtgccacgcccagtggccacacagggtgggagagaaccatggctgtcacccagatcccagggcagtttcaggggccaagctggccagcatttcccactcaccatcccctcccaccatgcacccagagtctttcctcccctggctgaggggtccagcttggtccaaaccagaggaaggatacagtcattaaaggaacctatctgcatagagcaagaggttttctcccacttaagccatttttttccctctttccttttctatgcaagagggttcttttcccacctcagcactccgct

SEQ ID NO: 3780 - DNA, 661 bp, Homo sapiens
  misc_feature [331]..[331]: Chromosome 9, SNP identification no. = rs13366180
  misc_feature [331]..[331]: allele = c, in linkage disequilibrium with rs957235, respectively
  misc_feature [331]..[331]: n is a, t, c or g
gccctggaaccaaatagtactttagagaacctcctgaaaatggtcaccttggtctttcacaataggaatagcaaggcccgagagagagaggagacatgggaaagagacacaggctttaatggccaccatgcaagcctacaaactccagaatccccgagttgcactcattaactgctacaaatgtggcaagccagggcactttaggaaaaaattgcccaggcagcatgaggaagccacctcgacactgttcaatctgcagtggggaccactggaaggcagactgtccccagggatgctggtcactgggtctagagccaatctcccaaatggnctagcaggattgatgggtcccagggctcctctctccagctccagtggtccagaccaccattaccatccaggagcactagggaattctggaaatcgaagggaggaaactggacctccttctggacactggcgtgggtctcttggttctcctctctaatgtgggcccccctcctgccttagcatgaccatgaggggtgtctcaggaaggcctttaacctgatacttttcccaaccccttagttgtagttggagaggcctcttgttcacccatgcctttctaataatgcctggaagcccaactcctctgttgggcagagatattctgcctcat

SEQ ID NO: 3781 - DNA, 661 bp, Homo sapiens
  misc_feature [331]..[331]: Chromosome 9, SNP identification no. = rs10979499
  misc_feature [331]..[331]: allele = c, in linkage disequilibrium with rs957235, respectively
  misc_feature [331]..[331]: n is a, t, c or g
atcatcccctgaatcagtggcttcttccccctggaacccaaagaacaagaggctacccaggtgaagactggcaaatggatttcacctctatgccaaaggcaaggggcacccagtatctcctagtatggaaagatacataccttcactaactgggtaaaagcatttccatgtcaaacagagaaagcctccgaggtgataaaagtagcaattaatgagataaattcttgctttggactccctgagtacctccagagtgataatggccccttgctcaaggcagctgtcatccagggggtctcaaaggtagtgggcatacagtaccatcttcatngtgcttggtgaccacaatcctcaggaaagtagaaaggacaaatgatattatcaaaaggaacctcaggaaactgtgtgaggagactcacctcccctgaactacccttgttcccatggccctactatgtgtgagaaacaccccttcaaagctgggtctgagtccctttgaaattatgtatggacagccttttctcaccaatgatttcttgctagaccaagaaacctctgatttgattaaacatataacttctttggcccatttccaacaggaactgaactagggcaatgtctgttcaacccaggggacctggtactggtaagggtagtcctt

SEQ ID NO: 3782 - DNA, 661 bp, Homo sapiens
  misc_feature [331]..[331]: Chromosome 9, SNP identification no. = rs10759317
  misc_feature [331]..[331]: allele = g, in linkage disequilibrium with rs957235, respectively
  misc_feature [331]..[331]: n is a, t, c or g
cctggtactggtaagggtagtcctttccctttctccctctaccagcccagattgggagggaccttacactgtacttctttctactcctatggcagtgagtgtcactagaatagattttttgattcattatactcaaagtaaaggcctggggagctgatggttccaattcacccagtgattcccaatccagaagagcacccaaagtgctaatgtgaagaaattggggaactcaagctaaaaatcacaaaagaagtgttaataattaattttccatgaatatcctccttatagtcttgcctatccctgatgttcttaccttcattctgttctntaacatggggtgcctttatcaaagactccttaatcctgaacacccatgggaatatccatttccctaaacagttattgctcccctaaagtgtaactgatttcatataaggtttaatttatttcaccagggtgaaacagctcagggtgcattatttttttcagaaggattagtatatttcacttatttctgtaatctttggcactagattcattccttttaactcctttttgtataatacacatattcaatccatgtatacttaacctcgtaaaacttgtttcttcttgcctagaggccatcaagctccaaatggtcatacaacctcggaga

SEQ ID NO: 3783 - DNA, 661 bp, Homo sapiens
  misc_feature [331]..[331]: Chromosome 9, SNP identification no. = rs12335971
  misc_feature [331]..[331]: allele = t, in linkage disequilibrium with rs957235, respectively
  misc_feature [331]..[331]: n is a, t, c or g
ctggggagctgatggttccaattcacccagtgattcccaatccagaagagcacccaaagtgctaatgtgaagaaattggggaactcaagctaaaaatcacaaaagaagtgttaataattaattttccatgaatatcctccttatagtcttgcctatccctgatgttcttaccttcattctgttctgtaacatggggtgcctttatcaaagactccttaatcctgaacacccatgggaatatccatttccctaaacagttattgctcccctaaagtgtaactgatttcatataaggtttaatttatttcaccagggtgaaacagctcagggngcattatttttttcagaaggattagtatatttcacttatttctgtaatctttggcactagattcattccttttaactcctttttgtataatacacatattcaatccatgtatacttaacctcgtaaaacttgtttcttcttgcctagaggccatcaagctccaaatggtcatacaacctcggagaatggctcccttttgccagggacccttaggtagacctctgagggaaatctgactgccattttcctcaaaataacacccccctgttagcaggaagtagctaagatcagtcatcatccatatgctaacagcagttagatgtgcctctt

SEQ ID NO: 3784 - DNA, 661 bp, Homo sapiens
  misc_feature [331]..[331]: Chromosome 9, SNP identification no. = rs10979503
  misc_feature [331]..[331]: allele = c, in linkage disequilibrium with rs957235, respectively
  misc_feature [331]..[331]: n is a, t, c or g
gaacacatcaggtgcaggtatccaaacaggctgtcacactggccctttgccctcactggcagaaggcagctgctccatgcaatgaggcagagggcccactgagctgctgtctgtggatgacagagctaagacaacattgtaacacaccctctggggccttgggattgcaggcaccccacctagatgctgctgcagggcccacaaagagtttgctcctgccagtgccaaagtggccggttcctgtacttgctcactcatatgttcctgcctgtctcccatgaggggttgaatagggcagcctgagtaaatgaggcacgctgttgtgagttcngtgaaagcgttaagaaaatatcctgcattacagctatatctccataagccacttacataaaatacatgagaagggtttccataaggtgttcttaattgttctattttttaattgcataagcaaaagattgccctgtggactataggattgacccgatgaaaatgacccattttgtccattaacaaattcaaactgggcaccgtggctcatgcctgtaatcccagcactttgagaagccaagatgggaggatcacttgagcccaggagttcgagatcagcctgggcaacatagtgagaccctgtctctacaaaaaaataaaaaaatagcca

SEQ ID NO: 3785 - DNA, 661 bp, Homo sapiens
  misc_feature [331]..[331]: Chromosome 9, SNP identification no. = rs10979504
  misc_feature [331]..[331]: allele = c, in linkage disequilibrium with rs957235, respectively
  misc_feature [331]..[331]: n is a, t, c or g
acctagatgctgctgcagggcccacaaagagtttgctcctgccagtgccaaagtggccggttcctgtacttgctcactcatatgttcctgcctgtctcccatgaggggttgaatagggcagcctgagtaaatgaggcacgctgttgtgagttccgtgaaagcgttaagaaaatatcctgcattacagctatatctccataagccacttacataaaatacatgagaagggtttccataaggtgttcttaattgttctattttttaattgcataagcaaaagattgccctgtggactataggattgacccgatgaaaatgacccattttgtcnattaacaaattcaaactgggcaccgtggctcatgcctgtaatcccagcactttgagaagccaagatgggaggatcacttgagcccaggagttcgagatcagcctgggcaacatagtgagaccctgtctctacaaaaaaataaaaaaatagccagtgtggtggcacacacctgtagtcccagctactcaggagactgaggtgagaggatcacttgagcccaggaggtcaatgctgcagacagctgtaactgtgccaccgcactccagcacgggtgacagagtgagatgcaagaccctctctccaaaaaaaaagagagagaattctatttat

SEQ ID NO: 3786 - DNA, 661 bp, Homo sapiens
  misc_feature [331]..[331]: Chromosome 9, SNP identification no. = rs7027352
  misc_feature [331]..[331]: allele = c, in linkage disequilibrium with rs957235, respectively
  misc_feature [331]..[331]: n is a, t, c or g
tataggattgacccgatgaaaatgacccattttgtccattaacaaattcaaactgggcaccgtggctcatgcctgtaatcccagcactttgagaagccaagatgggaggatcacttgagcccaggagttcgagatcagcctgggcaacatagtgagaccctgtctctacaaaaaaataaaaaaatagccagtgtggtggcacacacctgtagtcccagctactcaggagactgaggtgagaggatcacttgagcccaggaggtcaatgctgcagacagctgtaactgtgccaccgcactccagcacgggtgacagagtgagatgcaagacnctctctccaaaaaaaaagagagagaattctatttatactgccactggggagaaccactgaaacactcacttcactaaaaagtgcctgattacatttatctgtgtcaaaataatttattaactttggatcttgccataatatacatgacacacgtaacagagtgcagaaaaatcaaacatttttatttatttataggcattgattctctcatataaagcaacaccatctgtttaaagctcacaagcgattagaactgaaagcatcctatgaaaaagcaaactgatatttaaaaaaagaagaattgaacacaataatatatgtgagactaat

SEQ ID NO: 3787 - DNA, 661 bp, Homo sapiens
  misc_feature [331]..[331]: Chromosome 9, SNP identification no. = rs957235
  misc_feature [331]..[331]: allele = t, c
  misc_feature [331]..[331]: n is a, t, c or g
atttctcatttttctcccatcatcttttgctatattgaattctaatttcttgatttaaatttcttttatttactaacttctaagtatcctcggatttgagttgtttagattttatgtaaggcatttgtgataccaatagtggaaaaagtatttgatttggagctggaagatacaattttgagtccctcctctaccatgtcctgactttgggttattcagttacattctccagactgtttccttattgtaaaacaagggtgatacccacctcatatagttacagtaataatgacagctaacatctctataactttatgggttttttttcccncatatcatcccatttaatcttcacatcaactccttgagcttggtggggaataatcatcacccctttctacatacgtggaaactgcggctgggcaagcctaatgtaaaaggtccaaataggaagtgtttgagctggaatttgagctcaaatatttttcttataaaagcctataggaagttccacccatcatatttcattgggcttatacagcattttacagatctcaaagcattgtgcaaaagtaaagaattctttttttcattttaaaaaaatttactttaagttccaggatacatgtgcagaatgtgcaggtttgttacatagttatat

SEQ ID NO: 3788 - DNA, 661 bp, Homo sapiens
  misc_feature [331]..[331]: Chromosome 9, SNP identification no. = rs7854712
  misc_feature [331]..[331]: allele = c, in linkage disequilibrium with rs957235, respectively
  misc_feature [331]..[331]: n is a, t, c or g
tagtcccagctactcaggaggctgaggcaggagaatcacttgaacctgggaggcagaggttgcagtgagctgagatggcaccactgcacttcagcctgggtgacaagagtgaaactccatctcaaaaaaaaagaaaaagaaaagtagtacatttagtctcatcccagttttatggataactggggcaatttgaatatggcctataagttaatgatattgttgaatcaacattaattttgcaggtgtgattatgtatactacatgattatgtaggaggtccttgttcttaagggatgaatgctgaagtgtcttgaatttttactttcaaatnattccaaattaaagcagagacagggaaatgttaacaattgacgaaatcaggaaaatgatatatgggcattcattgtactattattcttttaacttttcttttggatcaaaatttgtcaaaataaaaatttagaggccaggcacagtggcttaatgcctgtaatcccagcactttgggaagccaaggcaggtggatcacctgaggtcaggagttcaagaccagcctgacccatatggtgaaaccccatctctaccaaaattacaaaaattagccaggcgtggtggtgtgcgcctgtagtcccagctactcaggaggctgagggaggggaat

SEQ ID NO: 3789 - DNA, 661 bp, Homo sapiens
  misc_feature [331]..[331]: Chromosome 9, SNP identification no. = rs16913557
  misc_feature [331]..[331]: allele = t, in linkage disequilibrium with rs957235, respectively
  misc_feature [331]..[331]: n is a, t, c or g
ctactttagcaaaacctacaaaaaaaaaaaaaacactgtggttgtcatgagtatctttgacgcagctatgaaaaaaaagacctgaatctggaaccaaaagacctgattcaagcccaccctatgcctcttacttctagcacttgggaaagcctcttaaagttatttgccctccatttccccatctgtaatagacctttctcacaggggtgtcaggtggttaaaaagagacaatggacactttgtaaatgccaaggacagttacatgtgaggagtgagatcatacgaagagtggcatcatgaagaatggaaaaatttgctcaagtattattanaaatcaggatagaaaatgagttataagagcctaaagtgttatttgtttttgcctgttcgttttttaagccagtgcagaaggacaaattgtgaatgcactttctcagtatccatcgttggttcttcatttctccagcttctaaaagcctaagggttcaatcctcggacctttctgctgttcattccataggtggttttctctaatctcatggctttaagtatgattcttcatatgctattgacgcgcaaattttgaaaatgtaacaagatgttaaaaaggaagtttggccaagactccaacacaacagatatcaaatactaaggtcagaag

SEQ ID NO: 3790 - DNA, 661 bp, Homo sapiens
  misc_feature [331]..[331]: Chromosome 9, SNP identification no. = rs4474093
  misc_feature [331]..[331]: allele = a, in linkage disequilibrium with rs957235, respectively
  misc_feature [331]..[331]: n is a, t, c or g
aaaaaaaaaacactgtggttgtcatgagtatctttgacgcagctatgaaaaaaaagacctgaatctggaaccaaaagacctgattcaagcccaccctatgcctcttacttctagcacttgggaaagcctcttaaagttatttgccctccatttccccatctgtaatagacctttctcacaggggtgtcaggtggttaaaaagagacaatggacactttgtaaatgccaaggacagttacatgtgaggagtgagatcatacgaagagtggcatcatgaagaatggaaaaatttgctcaagtattattataaatcaggatagaaaatgagttntaagagcctaaagtgttatttgtttttgcctgttcgttttttaagccagtgcagaaggacaaattgtgaatgcactttctcagtatccatcgttggttcttcatttctccagcttctaaaagcctaagggttcaatcctcggacctttctgctgttcattccataggtggttttctctaatctcatggctttaagtatgattcttcatatgctattgacgcgcaaattttgaaaatgtaacaagatgttaaaaaggaagtttggccaagactccaacacaacagatatcaaatactaaggtcagaagctaatgcaaatgagtatttccaa

SEQ ID NO: 3791 - DNA, 661 bp, Homo sapiens
  misc_feature [331]..[331]: Chromosome 9, SNP identification no. = rs3928854
  misc_feature [331]..[331]: allele = g, in linkage disequilibrium with rs957235, respectively
  misc_feature [331]..[331]: n is a, t, c or g
tgcaaatgagtatttccaaggtagatatctgagaagagtttgacttgggcccctcactgtaatcaagggcataaaatggtctcgtcactagagattaaggcgggtagtaaggatttgtgaaaggttttctttgaagaaagctgtgctgtgaataattcctctccatggaaaatagagatctattgacagaggatgacttggagagccgacatgtgttccctgcagtttggagagggggaagaagcacttaattaattggagtgtgactcctacctggggagtgtaaaggtaggaggctgctaaagccgtggatggcagcagaaaagagatnacccctcagggatcagccaaggtacagggtgtgtgtgtcccgtggacaagaggtgggccgtgcaggagaaagaatgggctaggacccttatcattcttgctcaagtgttctgcttggcagaataataggacaatacttgagaaagtctgtgtgtagtgagctgcagaaaacccagcagcagctggaggaagaggatgcattacccacgccagcggtgttgcaaaggggagccaccagagaatccacaaaagaaccaaggaagattcagcgttgaatattagccaaccccagggaaagtgtaaccatgttaggacagaactacccaagtaa

SEQ ID NO: 3792 - DNA, 661 bp, Homo sapiens
  misc_feature [331]..[331]: Chromosome 9, SNP identification no. = rs3928855
  misc_feature [331]..[331]: allele = g, in linkage disequilibrium with rs957235, respectively
  misc_feature [331]..[331]: n is a, t, c or g
aatcaagggcataaaatggtctcgtcactagagattaaggcgggtagtaaggatttgtgaaaggttttctttgaagaaagctgtgctgtgaataattcctctccatggaaaatagagatctattgacagaggatgacttggagagccgacatgtgttccctgcagtttggagagggggaagaagcacttaattaattggagtgtgactcctacctggggagtgtaaaggtaggaggctgctaaagccgtggatggcagcagaaaagagatgacccctcagggatcagccaaggtacagggtgtgtgtgtcccgtggacaagaggtgggccntgcaggagaaagaatgggctaggacccttatcattcttgctcaagtgttctgcttggcagaataataggacaatacttgagaaagtctgtgtgtagtgagctgcagaaaacccagcagcagctggaggaagaggatgcattacccacgccagcggtgttgcaaaggggagccaccagagaatccacaaaagaaccaaggaagattcagcgttgaatattagccaaccccagggaaagtgtaaccatgttaggacagaactacccaagtaagaactttctgatctctttttgctctaccctccaaggtctccaactctggagtggttgaaa

SEQ ID NO: 3793 - DNA, 661 bp, Homo sapiens
  misc_feature [331]..[331]: Chromosome 9, SNP identification no. = rs10816729
  misc_feature [331]..[331]: allele = t, in linkage disequilibrium with rs957235, respectively
  misc_feature [331]..[331]: n is a, t, c or g
gacaagaggtgggccgtgcaggagaaagaatgggctaggacccttatcattcttgctcaagtgttctgcttggcagaataataggacaatacttgagaaagtctgtgtgtagtgagctgcagaaaacccagcagcagctggaggaagaggatgcattacccacgccagcggtgttgcaaaggggagccaccagagaatccacaaaagaaccaaggaagattcagcgttgaatattagccaaccccagggaaagtgtaaccatgttaggacagaactacccaagtaagaactttctgatctctttttgctctaccctccaaggtctccaacnctggagtggttgaaaccatagctaatgagaagataagcaagaaagagaaaaaacctgaccataacttcttccccaatgtggtagcctacctgctataggcacaagcttgagaggtataagatgggggagttggaagcagaagaaccatgacctcttcatattaaaaaatacgtatttttttaatcagcctctacattgggtatacaccatgacctttttatgatgacataagtgttgattaatagagtgaactggacatttttttctggatcaacattgcattttcctaaagtgaacgatggaactttctgatagacgagaatgacgaga

SEQ ID NO: 3794 - DNA, 661 bp, Homo sapiens
  misc_feature [331]..[331]: Chromosome 9, SNP identification no. = rs7026291
  misc_feature [331]..[331]: allele = t, in linkage disequilibrium with rs957235, respectively
  misc_feature [331]..[331]: n is a, t, c or g
ccgttgatggatctaccattctggggtctggaggacagtggcccttttctcacagctacactaggcagtgccccagaagggactctctgtgggggctctgacctgacatttcctttctgcactgccctagcagagcttctccatgaaggccctgcacgtgcagcaaacttctgcctgggcatccaggcgtttccatacatcttctgaaatctaggtggaggctcccaaacctcaattcttgacttctgtgcacccacaggcttaacaccacatggaagctgccaaggcttggggcttccatcctctgaagccacagcccaagctgcacatnagcacctttcagccacagctggagtggctggaacacaggacaccaagtccctagactgcacacagcatggggaccctgggcctagcccacaaaaccactttttcttcctgggcctctgggcctgtgatgggagtggctgccaggaagttctctgacatggcctggagacattttccccatggtctgggggattcacattaggctccttgctatttatgcaagtttctgcagccagcttgaatttgttcccagaaaatgggtttttctttactattgcctagtcaggctgcaaatttttaaagttttatgctctgcctcccctataaaact

SEQ ID NO: 3795 - DNA, 661 bp, Homo sapiens
  ACTL7B
  misc_feature [331]..[331]: Chromosome 9, SNP identification no. = rs3750466
  misc_feature [331]..[331]: allele = c, in linkage disequilibrium with rs957235, respectively
  misc_feature [331]..[331]: n is a, t, c or g
tgttaaggttgggagcacttgtgaacagcagaaacaggagactggagtcggacacccagctgtgcatctcctccaacctaccgctaggtgacccaagctagtcccttcatcagagccaacccccttagttgagccagcgatgaggagtgtctttggatcaggttttgaacctggaggtactaataaaacaggaggccactttctaggccctgagatgatgtcactatcatgaggcaggcagagggggtgggatcagtatggtagcccccttccttacagcccccacctccagtgcaaaaggtgctgccgcttctaagcccgactccccccnaccctctgctatcagatagaagcaagaaacccagactagacaagagccatttcagagtaaacctttatgtgaaattctgtaaatgtgtatagagaggcctgtggccatctgtgctggaggccttgtctgtggaaatgccgaggctcagcacttgctgtagatggccacgctgccccgctcctcaaactcttccttgctgacccagagctgttggaaggcctgcagggaggccaggatggaaccgccggtccacacggaggtcttcctctcaggagcggcagccactgcagggctgtccccggggcagaggaggctcagctccctctggaa

SEQ ID NO: 3796 - DNA, 661 bp, Homo sapiens
  ACTL7A
  misc_feature [331]..[331]: Chromosome 9, SNP identification no. = rs7872727
  misc_feature [331]..[331]: allele = a, in linkage disequilibrium with rs957235, respectively
  misc_feature [331]..[331]: n is a, t, c or g
cccgcaggtaaacgtgctgcctgaaagagacagtgccgtgtggaccggtggctccatcctggcctcacttcagggtttccaaccattgtgggtccaccgctttgagtacgaggaacacgggcctttcttcctctacagaaggtgcttctgaacagcgacgaggatggacactgcactggcagtgcctaccctcgacagggtgagcgcactcctacacacagggggtggagccggcgcttattcctgtagcattaaacacccctcatatgcccctccacagtgtgtttctctacttcctgacttcataagaaacaacttcacacgtgcagcntctgccttaaaatatacatttcccaaaacaaaagcaggagtagggggaggatgaacaaaaaagggcatgcattgtatgtggattgcttaaacattcacttgttctaaaattatgctgccccttattttgtgcattccccgctttaggaactactttacggttaaactctgcttggaagggggagtgcaatgaagattagagggtaaatgctgttggggcatataagcagttccctttccataaatgccaataggaagtatgctgtaacagtgcaaactcccacaaagcatcagtgtccatttcatacttcatcaacaaccctgagggact

SEQ ID NO: 3797 - DNA, 661 bp, Homo sapiens
  misc_feature [331]..[331]: Chromosome 9, SNP identification no. = rs10512406
  misc_feature [331]..[331]: allele = a, in linkage disequilibrium with rs10817049, respectively
  misc_feature [331]..[331]: n is a, t, c or g
ctaattgcccttcccagggtttgaagaaagtggagctcttctacatggttagtccttgacagtctgattcaataatatgatcttttttttaaagctatgataatggccatatcctttagctagaaatcttttctaaggaaatagtcagagatgagcacatgcattcatatatgatagaatttacagtacaattacaaaagtgaaatgttggaaatcttggaaacaacttttatatataataataagagaatggttgaagtatattaaatataaagaaaaatacatagttatgcttatgttttcaaaactaatgttaaaaatgctaaatacntactgttaaattgatacacagttgtgcaatttttttaacgtgcacatagaaaagatgagaagaaacatacaagtatgtgatgacatttatcttaaggtagaacaatagttattgattgtcacttatttgttatattttaaactatagaaagtaattaagctacagattataaatttgtatctatatgcagatagatattataaaatgtccatcagttgtgtcctatagctaaataatgtaatatcgtaaacctcctgaaatgtccatatttaacataaaggagtttttcaaattttggctttatgtgacagaccgtcctaaacttaatga

SEQ ID NO: 3798 - DNA, 661 bp, Homo sapiens
  misc_feature [331]..[331]: Chromosome 9, SNP identification no. = rs10817049
  misc_feature [331]..[331]: allele = a, c
  misc_feature [331]..[331]: n is a, t, c or g
taaagctatgataatggccatatcctttagctagaaatcttttctaaggaaatagtcagagatgagcacatgcattcatatatgatagaatttacagtacaattacaaaagtgaaatgttggaaatcttggaaacaacttttatatataataataagagaatggttgaagtatattaaatataaagaaaaatacatagttatgcttatgttttcaaaactaatgttaaaaatgctaaatacgtactgttaaattgatacacagttgtgcaatttttttaacgtgcacatagaaaagatgagaagaaacatacaagtatgtgatgacatttntcttaaggtagaacaatagttattgattgtcacttatttgttatattttaaactatagaaagtaattaagctacagattataaatttgtatctatatgcagatagatattataaaatgtccatcagttgtgtcctatagctaaataatgtaatatcgtaaacctcctgaaatgtccatatttaacataaaggagtttttcaaattttggctttatgtgacagaccgtcctaaacttaatgacgtaaagtgataatgtcttactatcatccttgattctatgtgttgactggaatcagttgagtggttctcacttgggatttctcatgtga

SEQ ID NO: 3799 - DNA, 661 bp, Homo sapiens
  misc_feature [331]..[331]: Chromosome 9, SNP identification no. = rs10817051
  misc_feature [331]..[331]: allele = a, in linkage disequilibrium with rs10817049, respectively
  misc_feature [331]..[331]: n is a, t, c or g
atagttattgattgtcacttatttgttatattttaaactatagaaagtaattaagctacagattataaatttgtatctatatgcagatagatattataaaatgtccatcagttgtgtcctatagctaaataatgtaatatcgtaaacctcctgaaatgtccatatttaacataaaggagtttttcaaattttggctttatgtgacagaccgtcctaaacttaatgacgtaaagtgataatgtcttactatcatccttgattctatgtgttgactggaatcagttgagtggttctcacttgggatttctcatgtgatggcatttagacagcngctgggtctggagtgatctaaaggctaaaatgagcaagatgtccagatgtccaggattctccaagagaatagcttggactttttctacggttgctcaaagctccaaagacaggaagcagaaactgctggatctattaagagtgatggctggtactgacatgccatcacttccaccatattctaatggccaaagccgatataaggccaatccaagaaagaggtagaaaaatggactccacctcttgataagagagtagccaggtcacactgcagaagagcaggtggaatggaaaatattatcatggaccactttgtaaaatactctctgcc

SEQ ID NO: 3800 - DNA, 661 bp, Homo sapiens
  misc_feature [331]..[331]: Chromosome 9, SNP identification no. = rs4131385
  misc_feature [331]..[331]: allele = t, in linkage disequilibrium with rs10817049, respectively
  misc_feature [331]..[331]: n is a, t, c or g
taaaccactgccttgtgtgtataatttttaagcacatattatatcttcatatcttttccatgtaaatgaaagaatataaaatactgttacaggttttgttttctttcctggtaaacatagattccatctggattcaaaagagattaagtatgttgaaaactgcaaggtagatctagaaagagccaaggatatggaaagtaagtgtgggtatgtttagtgcatcattttaatgcagaatggtttcctagtctgaatattattaggcaaattaattataagaaacatctggctggaggaaaacaaggcacaattagggtgaacagaagttagnggagtatgttacttcattttaaactgttgaaatttgtgagtctgagatcaaatcacacttctgcaaaggataaattaagctacttcaaattggtcctttatcaagtggagaagtaagagacattcctatttttttagactttatatcagcttaagatccactgagcacattaaagctctttgaaggaatagaatacttgggtatcgggctggcaaattgaaaaaaagaaggagatctctaaaagagacaaatttccttctaataatgagtggcagagagtattttacaaagtggtccatgataatattttccattccacctgctcttctg

SEQ ID NO: 3801 - DNA, 661 bp, Homo sapiens
  misc_feature [331]..[331]: Chromosome 9, SNP identification no. = rs10817052
  misc_feature [331]..[331]: allele = a, in linkage disequilibrium with rs10817049, respectively
  misc_feature [331]..[331]: n is a, t, c or g
taaaatgttgggatgtcactttcaagattacgttacaaaaaaagactctgttttgcttttttctcactctctttcactctatctctctctcactctgaggaaggccagttgccatgttgtgagatgtcctaaggaaaggcccatatggcaaggaactgatgtctctgaccaacagccaacaaggacctgtagcatgtaagcagccacgtagtgagcttggaagtggagcttctgaaacctgtttacagccgtatgagtggccttggaagccggtcctctccctgtcaagccttgagatgactgcagccctgggtggtaccctgattgactncagccttatgagatgccttcagccagaaaacccagttaagtgacaccaggaatcctgaaccacagaaaatgtcacatactaaatgtttgtgttaagctactaagttttaggataatttgtcatggaagcagcaatctgggcagcagcaaagcccagagagagagctcatttctctgactagatgaacaaagaaaagggacacctatggtccaaagagtatggaggggatcatcattgttctctctgtctctctttctctctctctctctctttcttgctacttcatcatgaggagcatctcagctgcacagactacacacagagtaaggg

SEQ ID NO: 3802 - DNA, 661 bp, Homo sapiens
  misc_feature [331]..[331]: Chromosome 9, SNP identification no. = rs10980486
  misc_feature [331]..[331]: allele = a, in linkage disequilibrium with rs10817049, respectively
  misc_feature [331]..[331]: n is a, t, c or g
aagaagcatagctttgaaaagtgaactacagtataaaccaccagctatatctcagactaacccaatgaggtacacgcacggagcgaacccaagcagcatagaaaaggctttgaaaactataactgccacccataaaaggagagacagagctcatggtctaaacctaactgggcaaaaacaaaaacaaattgacatctccaacaggttttcacatgcccacgaatctcacaatataatcatcaaagttttcagcatacaacccaaaattactttaaaaagatagaaaaatctgatcacttttcaaggaaaaagataatcaacaagtgcaaancctgagatggcctagatatttgaattatcagacaaaaatgttaaagccgttgttataaaatgctccataaggtaaaggtgaacacttttaaatgagcagcaaagtgaaagttttgagcagaaaaactatgaacatcaatgaaatggaaatttaaaaactgaaaaatagaatataaaattttttttaattactggatgggcttaatggcataggggaaatgacagaggaaatagcattgaatttgaaagtaggaaaatataaattatcaaatcagaaaaacaaaatgacagaaaagatttttaaaaaaagaacagagtctctggtacctgt

SEQ ID NO: 3803 - DNA, 661 bp, Homo sapiens
  misc_feature [331]..[331]: Chromosome 9, SNP identification no. = rs10980487
  misc_feature [331]..[331]: allele = t, in linkage disequilibrium with rs10817049, respectively
  misc_feature [331]..[331]: n is a, t, c or g
cctgctttaaaataaatgtagaaggaagcgctttagaaaaacagaaatgtagatattaaggtaaacatacaatcatccctcaatacatacaggtgattggttccaaaccactacatataccaaaatttgcgtatactcaagtccggcatttggcccggtagaatccacgtatacaaaaagttggccctcatgatttgcagggtttagatcttcagtactgtattttcgattcacatctggttgaaaaaagtctgtgtataagtggacccacacagttcaaacatgtattgttcaaaggtcaactctaaaagcctatttttctacttttaanttctttaagtaagtagaattatcaaaagccaaaattataatattgtctggtgggggtttccatgtgagtaaatgaatatatattatatatataatatgcacagatattatatcattattattatattatgtaatataattatatggccataggcaagttgcctcacctctctgagtattggtgttttcatttatacaacagggatagtaatcctaagcctaaccctaatattatattaacataactaataatataatattatatataagtattatattatatatattatatatattcactacataaagaagagagcataaagggaccagg

SEQ ID NO: 3804 - DNA, 661 bp, Homo sapiens
  misc_feature [331]..[331]: Chromosome 9, SNP identification no. = rs10817054
  misc_feature [331]..[331]: allele = t, in linkage disequilibrium with rs10817049, respectively
  misc_feature [331]..[331]: n is a, t, c or g
tattatattatatatattatatatattcactacataaagaagagagcataaagggaccaggtaagatttctacatttctatatgttctaattaaaaaacagactatcaaattcaatttttaaaaagacaattatgtgactacaggaaacacatttaaatatagatatatagatagataaaataagagaaagataaaagatacatcatgaaaacaccaatcaaaagaatactggagttgctttattaatatcagatagaatagacttcagaattaaaaatattatcagggataagaaaagacattaaatactgaggaaggggtgaattgtcngagaatatgtaataatcctaaatgtgtatgctcctgacaacaggcatcaaactatgtgaagcaaaaactgagagaactgaaagaagaaataggaaaattaacaaatctatttgaagatatctacactcaggaattagaagaactagacagaaaaatcaataaagatatagaagactaaaacaacactagttgacatttatagaatacaccacccaacattagcataatacacaatattttcaactgttcatggaatattcatcaagaaagaccatatgctgggccataacacaagccttaattgatttacaataattggaatcatgcaaa

SEQ ID NO: 3805 - DNA, 661 bp, Homo sapiens
  misc_feature [331]..[331]: Chromosome 9, SNP identification no. = rs10817056
  misc_feature [331]..[331]: allele = t, in linkage disequilibrium with rs10817049, respectively
  misc_feature [331]..[331]: n is a, t, c or g
aaaaatatatactcttaggcaacattttgctagtagcttgataatcataagagtgtcttcttgctagcaatattttgagtacaacagcaacagagtgtgcaatggattcactggttaagccaaaaagttataatgtttgaacctcccaagggccacctccatatttaatatgaatttctttaaaccaccagagctgggcctcatttctcccatactctgtgggagttctgactttcatccaagatcttccctatgactttaagagcagaaagacatggtccttgtggtgtctcccaaactggactcctcttagttacaagtggactatgantgacttattaaaatgatcctcatctttccagaaacacttgaatgctgccaccagtatattttttagctgagaccttcctcttccttttttccccataaccagaatctgtggtctgtgctaacattgcttctccatgaaaatttcactcccactccactctttctacctttctgcagatgcctgcactttcaccgcaaatcatgaaatgattacatatttttaacagcattattgagattaaatttatttaccataaagctcacccaggtagcagtggctgccagctataccctttcatagaattagccttttctttaggctttgctcttc

SEQ ID NO: 3806 - DNA, 661 bp, Homo sapiens
  misc_feature [331]..[331]: Chromosome 9, SNP identification no. = rs10448267
  misc_feature [331]..[331]: allele = t, in linkage disequilibrium with rs10817049, respectively
  misc_feature [331]..[331]: n is a, t, c or g
ttatttttaagtgtaaataatcaattctaaccaagaatgtagaagtaaaccagtaactcacatttctgcttttaagtatactaagaacagtatcaaatgtggctctcacagttctgaaacttaagaggaacgcatggagattctgattgtgatatttatgtctatgtattttttctcttgattttggtaatttacaatatgggaataagtccatcttccaaaacctaattaggaatacagtgtttagcagatcagtaatatgtgtatttctctctttctaattaggataatcctcaccagcctcagagttcatgtctgaaagtatagaggnggcagataaccaatgcaagtgaacatgggtgaaaatggatgaaagtccatctgggctgtctgcaaaatgagaagattctagacactgtttcttaaataccttggaggcgaggatcacaaaatgctctcagaagtttatgaaagctatggagtctccggaaatattcagaattttgcatgtaattttcatagattgcagattccctgaagaacaccagtagttgaggactcctagaacccaggttaacagtagctagggttcatgcagtacttgacatgtagtaagttataaatgtttgtgatgatgagaattaatagctttgtttcatgg

SEQ ID NO: 3807 - DNA, 661 bp, Homo sapiens
  misc_feature [331]..[331]: Chromosome 9, SNP identification no. = rs10980495
  misc_feature [331]..[331]: allele = c, in linkage disequilibrium with rs10817049, respectively
  misc_feature [331]..[331]: n is a, t, c or g
aaaattaagtggctcattttttcaatgtgtatgactccaagtcgttgaaactgatacagaagtataaataagaggtattaagtgatgctgaaactgtggtaggagaaatagcaatggactaatggcctcctcagggaagcctaaatataggtgttgcattgtttacaaatatattcatccttttagtcacttattcagcatatatcaaacacctactatgtctagatttcatgttagtttctgcaatgaatcaataatttccttgtcattttaaaataatatttatctatcatcttagagatgcaacttggtccccttcatccagcaattnctactctaacccgtttttcacataatagccagagtaaattttgtaaagttacaattgtattgtaggataaaggtctaactccttaatgtggtttacaatgccctttacaaaagtctcacttttacttaccctcttagtctctgcctttctacacttactgtctagccatactgaattacttcgctgtcactcgagacttagttctttgcatgctctttcctccaccaaaaatatttttttttctcctctccttacctggcttcttttttaaaaacttttatttatttatttatttattttgagacagagtctctctctatcacccaggtg

SEQ ID NO: 3808 - DNA, 661 bp, Homo sapiens
  misc_feature [331]..[331]: Chromosome 9, SNP identification no. = rs11789078
  misc_feature [331]..[331]: allele = t, in linkage disequilibrium with rs10817049, respectively
  misc_feature [331]..[331]: n is a, t, c or g
taatttttgtagttttagtagagacggggtttcaccatgttggccaggctggtctcaaactcctgacctcaagtgatctgcctgaggcctcccaaagtactgggattacaggcgtgagccaccgttcccggcctctttacctgacttcttttctttaccctttagtttctgacataaacatcttatcagtgaaaccttccctaaggaacaatgccaagtcagatgaccatagtgacctatgctttccaccttgcagcacataacacagccagttatttatttccttgcctcttctactggactgtaaaccccttgaggacaggaaatatantttgcttgccctggaaacctcgttatgtgaaatagcactttggcataccttggtaaaaaaaaggctgaatgaggaagtggaagagtgagccatgcattcttcctgtctctctgagtgaggtcattcaaaatggcaagggtgtaaagacgagggaggcattcatttgccttgccacttgactacatgggttggaatatttgatggtaaatgcacatacttaatcatactcttttttaaacactacatttaaattctaatttactattaaaatatttccaacttaaatcagtaatgccttaatttttcttatggagaagagtgtgtgactta

SEQ ID NO: 3809 - DNA, 661 bp, Homo sapiens
  misc_feature [331]..[331]: Chromosome 9, SNP identification no. = rs10817062
  misc_feature [331]..[331]: allele = a, in linkage disequilibrium with rs10817049, respectively
  misc_feature [331]..[331]: n is a, t, c or g
actcccccttcctgcgaggttgtttgcaaaataacatgcttatgcctcataccactgatccaaaacccaatgcatcccaccattgccaagcacaataacacctaatggtcaacaccagagctctaaaaataagttcctcattcacacatgttttctttacactagccaatccacaacttccgcaggaaaaactaagggatagtgcccgtggctttggtccttcctaaagacatagccccacaggttcccctcctccccatctcattgcccacccactggttgagcttcctgctaccacctacagatttccccataggcctcacattggcanccccaacctctctggaaccggtgagtaataaattgcttctgttttatgcattttggtttcacaacctcactgagtctcacttggctgacatacttgaggctaactttccccctatcagggctctcctagggagtgtctatctcggcttatggcgactctcaagagagagatcacaaaaacaaagcagacagaaatgataacaatagaaatcataacacactgcattggagaagtacagagagttttcttcagacctcttaggttctgtggctgggtctgagaattaaagtaacagaagacatattaacaagagaaaaacatacaagttta

SEQ ID NO: 3810 - DNA, 661 bp, Homo sapiens
  misc_feature [331]..[331]: Chromosome 9, SNP identification no. = rs10980498
  misc_feature [331]..[331]: allele = t, in linkage disequilibrium with rs10817049, respectively
  misc_feature [331]..[331]: n is a, t, c or g
taacaagagaaaaacatacaagtttaatttttttcatatgtacacgggagtcttcataaggaaaattaagacctgaagaagttattaggcctcaatagttatatatctttttaaacaaacaacaataaattgtgaggatgtgacaacaaagaggcttgggccaaaggcagtaaatgtgggacagtgactaggaaatatatgggagagactagtggaagataaggactattataatagatttgtttgtacgattgattttggtgtcaactccaagtctccagtgataaagatggtcttctcttcctggtacaagaagggcatctttttcacnggaaattttatggcctgcttttagataaaaggtgttcaaagcgtattttctgtatctgctgattctcaagtgtctccagctcaaaataatcaatatgcaaaacaataaatttgggggtgacgtgttctgaacccctttagaagaaaaatacatcaagtttggttaatagacaaaaaataaaacaagataaatagataaattaaaaagacatttgtcattgagatttatggagagacacacaacaaaaggcaaacaaattgaccaatctgtggaatgccttccattcctgttgcaacaaaagtagacaaataacacaataataatttgacc

SEQ ID NO: 3811 - DNA, 661 bp, Homo sapiens
  misc_feature [331]..[331]: Chromosome 9, SNP identification no. = rs12378245
  misc_feature [331]..[331]: allele = c, in linkage disequilibrium with rs10817049, respectively
  misc_feature [331]..[331]: n is a, t, c or g
aaaatgaaattctcttttactccatcagtttagcagtggtgtaagcacagaggcattctcatctgttgttactgagaggcaaattaacagagcctttgggaaggcagtgttacaccctctaaaaatatttaaaatgtgaaaagctaagacagcaatttcacttcaaggaatttaatctctaaaactataatgcacacatatatacacataagcaaacaggataaaaatatttatgtatgaaattgttccctgtagaaatatttgtgtagcagtcaaattgtaatcaatataaaggatgaaataaattataatatgtgcttattactagtangctgcaatgcaatgtttccacttaaaatgggttagaactatgtgtacaaacattgaatgatgtctttaatatagtttgagttcaaacatgttgcagttatgtatatgttatatatgtatgtatatatatgcacattaaatcatattttaaaaataaattcagatgagttgtatgattaagttttctgtctgggtatcaccatttatttttctgttatttattaaactgaccttggacaagtgacctgactccatgtcctccatgtctaaaatggaaataataatttggtgagtcttaaatgaattaataaatgtaaaacaattagaatct

SEQ ID NO: 3812 - DNA, 661 bp, Homo sapiens
  misc_feature [331]..[331]: Chromosome 9, SNP identification no. = rs10817063
  misc_feature [331]..[331]: allele = a, in linkage disequilibrium with rs10817049, respectively
  misc_feature [331]..[331]: n is a, t, c or g
tctatatattaaagtcatcattgcaattaaggctattctaaataagctaatgttgctaacccaagtgttatttaggagagtgttattttactttagaaaaaaatatgtctttttttaagtttattgaatttttctttgagtgtttttttatgataaattttaataactgtttctcagggaccatgaaaaggattagtctatatttgtatgatatagaattcaaatattataactttcttatatttctcagattctctatataatgttatgtgctttttgttgttgttgtttttctttttttttgagatggagtctcactctgttagccagngtggggtacagtggcatgatctcagctcactgcaaccgccgcctcctgggttcaagcggttctcgtgcctccgcttcccaagtagctgggattactgggattacaggcatgtgccaccacgcctggctattttttgtatttttagtagagacggggtttcaccatgttggtcaggctggtctcaaactcctgacctgaggtgatgcacccactttggcctcccaaagtgctgggattacaggcatgagccacggcacccagccaatgttacatatttttttaaccacttgatttctcatggagaagagatatcaaaatctctgacaattg

SEQ ID NO: 3813 - DNA, 661 bp, Homo sapiens
  misc_feature [331]..[331]: Chromosome 9, SNP identification no. = rs10817068
  misc_feature [331]..[331]: allele = t, in linkage disequilibrium with rs10817049, respectively
  misc_feature [331]..[331]: n is a, t, c or g
cggctgagagcacaggtgctggattcaggcttccttaattgaaatcatctctctgcttcttaataaccacgtgaggctgcaaattacaaaattagtttccttatctgtaaaatgagaaaatgatagtataatacctacctcataggtattataccatctaatgaggattaaattccaatgaggattaaataatagatacaaaatacttggaacagtcagtgattggcacagagtaagcactcaagcagagttagctgttaatatcatcttacaaagaataattctaagaaaagtcgaaagcctaatttctaaaactcagctttcttgggangttactggaatagtactatcaatactaacctctggagatatttatttatgtttccaaggtttaatagaaccaccttttttattataaaattcttaaattaaataagtgactattaaaacagattataccaaagccctttcagcatgaaataatttttttattatactttaagttctgggatacatgtacagaatgtgcaggtttgttacataggtatacacatgtcatggtggtttgctgcactcatcaacccgtcaactacattaggtatttctcctaatactatccatcccctagcccctcaacccttgacaggcctcgtgtgtgatg

SEQ ID NO: 3814 - DNA, 661 bp, Homo sapiens
  misc_feature [331]..[331]: Chromosome 9, SNP identification no. = rs10980508
  misc_feature [331]..[331]: allele = t, in linkage disequilibrium with rs10817049, respectively
  misc_feature [331]..[331]: n is a, t, c or g
gctgtaaactcccaaatttatattcaagcccaaacttcttttctgaggtccagatgtaaacctgacctgcttactagacattttgattcagatatcacagaggtattccaaacttaacgtctaaattcaaaatcatgattaagaaacttttcctctttaagctttttcttttccaattttctgcctgttagatcacaccacactgattgttatttagtccaaaaatctgggcatcattttaattcctctttccatctcaactaatcccaaccttctaacatcccagatggaagcagcagtctttttataacttaatctcagtagcaacacntcaatacttcttctgtattctattcattagacatgagtcctcaagtccagtccaccattagggcagcttgacggggactgcctgtcatccttctgcagtgctccaagccttgccaagcacttctctcctcacatagccacatggcctggtggatgcagttgtcaatgtttcttttggattctagtgtctggcatggccctagcaatgatctgctgaactggattgaaatatagcactctaagccatggtaagaacatataaacagtactaatggctgggactaaacggagaaataaaactcatacaatgggatgtttcctttggaggtga

SEQ ID NO: 3815 - DNA, 661 bp, Homo sapiens
  ATP6V1G1
  misc_feature [331]..[331]: Chromosome 9, SNP identification no. = rs10982322
  misc_feature [331]..[331]: allele = g, in linkage disequilibrium with rs7027937, respectively
  misc_feature [331]..[331]: n is a, t, c or g
ctcagcctcccgagtagctgggactacaggcgcccgctaccacgcccggctaattttttgtatttttagtagagacggggtttcaccgtgttagccaggatggtctcgatctcctgacctcgtgatccgcccgcctcggcctcccaaagtgctgggattacaggcgtgagccaccgcgcccggcctatatagcagattcttagaggagagatgcgaatacatgtctttggaataatttcctagcagtgggaatactgtgtagtttacttttggtagatgtggctcctgttaactctgagaatacctcacatgtgctccagccatgaggtcntattgccagcttctgagtatactgataggtgagcctgggtttctccaaaagtcaacaagtagcttacgaaatgtacctgaccaaccagagcattgttctgataatccctccgtgacatcactccccatctccaggcattgggatcccgtggcagttgcagcactgaagtggagaaggagacccaggagaagatgaccatcctccagacatacttccggcagaacagggatgaagtcttggacaacctcttggcttttgtctgtgacattcggccagaaatccatgaaaactaccgcataaatggatagaagagagaagcacctgtgctgt

SEQ ID NO: 3816 - DNA, 661 bp, Homo sapiens
  C9orf91
  misc_feature [331]..[331]: Chromosome 9, SNP identification no. = rs7046435
  misc_feature [331]..[331]: allele = t, in linkage disequilibrium with rs7027937, respectively
  misc_feature [331]..[331]: n is a, t, c or g
ggcctatgcggctggcctttgctgtggtaagggggaggtggcccgcacactgaccctgccctgacagcttatggcaccaccaaattcagcaccgtgtcttggagcctgttggtgtgggtcaggggcttgggggctgttggcccaggtgcctggaaacgagcagtacatatggacattgatttgggatcagaggaaatttatgggagagagttgtaaccaggtcgttgcataaaggatgggagtcagggtttactgtgggcagagcttgggattgggagtctgcagatccacccaggctctgggctcaatatctggccttggccaagacttncctcctctccggaacttggtttccccatctgctcaacagatgggttatttcagctctattcatatatacatgtacatatatatgtgtgtatacacatatgtatatatatataaaatatatgtatacatcttcatattgatacatataaacacttacatacataaatgacagagccaggatttgaacccaggcagtctggtttcagcgtctgtgcttggaaccactgtgatttgctgctgttttgtatgtataaatggtcaaatagcacacctgactcccaggtcccacttctagggagaagggaaaagggtgggaaccagcattgattca

SEQ ID NO: 3817 - DNA, 661 bp, Homo sapiens
  C9orf91
  misc_feature [331]..[331]: Chromosome 9, SNP identification no. = rs7031094
  misc_feature [331]..[331]: allele = c, in linkage disequilibrium with rs7027937, respectively
  misc_feature [331]..[331]: n is a, t, c or g
attacaatgccgtgaaataggtgttattatccccattttacagatgaggaaactgagacttaggggagttataaattgtccaaagccatatagtgcttgaaggatcattatggtctttgaactgatatttgtctcacttcagatccacctgcctttttctgttttatttaaaattaaggtaaacaaggattaggagtagctactaaccctttttgtctacttttgcttataaacaaggaacattagctcattctcacagatccaggtgactgcatcaatctcttactggtgctgtgagctgtctgaatccaaggagggtatcagtagtgtntgaaaggtgtccctttgaatggagctgctttatgcaaggactgaagttcctgaccatgctctctgtctggcatcttgcaggttttctatgtggtggtgtgggccaatatctactctaccagtcagatgtttgccttggggaaccactgggctggcatgctgctcgtgaccctggccgcggtgagcctgaccttgactcttgtgctggtctttgaaagacaccagaagaaggtgagatgtctggagatccctgccacactctctccagaagagcggtgcaggcgtgagaatcagatttttcccttttgcctccctcaaagaatttccctgg

SEQ ID NO: 3818 - DNA, 661 bp, Homo sapiens
  C9orf91
  misc_feature [331]..[331]: Chromosome 9, SNP identification no. = rs999009
  misc_feature [331]..[331]: allele = a, in linkage disequilibrium with rs7027937, respectively
  misc_feature [331]..[331]: n is a, t, c or g
attgctgggattagagacatgactgtcaatagagcaccaggtcggcatctgcccgtcacaggagggaataatgtaaattacctctccccagacgtcaactttaggcaccctgtgctgcagggtgggttcagtaatcctcccttgttcatagggctgttgtgagcacccagggagaggaagtgcatgagagggctcagttaactaaagtactgtcaggatacgggcaattactgctctcctctcacattcccaaaacacagcttgcttccagaaaaacaatccacagggattagacaggaaaagcagagagaacaatcacatacacaatttnatttcttttagtcactgggcttacgggctagtgtgaattttcatggccagggaaattctttgagggaggcaaaagggaaaaatctgattctcacgcctgcaccgctcttctggagagagtgtggcagggatctccagacatctcaccttcttctggtgtctttcaaagaccagcacaagagtcaaggtcaggctcaccgcggccagggtcacgagcagcatgccagcccagtggttccccaaggcaaacatctgactggtagagtagatattggcccacaccaccacatagaaaacctgcaagatgccagacagagagcatggtcaggaa

SEQ ID NO: 3819 - DNA, 661 bp, Homo sapiens
  C9orf91
  misc_feature [331]..[331]: Chromosome 9, SNP identification no. = rs7866831
  misc_feature [331]..[331]: allele = c, in linkage disequilibrium with rs7027937, respectively
  misc_feature [331]..[331]: n is a, t, c or g
aggatttagacatctttggggaccatttctctgctaccacacctatgttgtctttccacctacttgggaagctcttgttcctccatcccccgatccctggcacagtgctggactctgatcttgcctgactcagaaagagggggcaggatgttgggaaatgtaaatcagcatttggggtgtgaattccacttagtgcgtgtgttcacgagacaaacgggaactatatggtgtactcattctgtaaggatctttgttgggctttgccacaagactgacaaaataatgctgcccttggggtctgttgaagctttcatggcccttgtgtttggcntataaaacaaatcgagctggctactcctgcagcaagaactttgtcttggggaggggaagaagcaaagtgttttgttttagttagcaggagcaagcaaaaaagattggcacctgacaggtgcttcgaggatgtggatgtaattcacatggtggagggaatgcctgctttggctctctgcctctgtctcttctttcctccttttattcagctggtatttatgaagcccttgatagtaccaggacataccttgtcagggccgcacagccaggaaacagcagagctgggctctggcccaggactgacactattgaatttactgttccaacaata

SEQ ID NO: 3820 - DNA, 661 bp, Homo sapiens
  C9orf91
  misc_feature [331]..[331]: Chromosome 9, SNP identification no. = rs7856554
  misc_feature [331]..[331]: allele = t, in linkage disequilibrium with rs7027937, respectively
  misc_feature [331]..[331]: n is a, t, c or g
caggagcaagcaaaaaagattggcacctgacaggtgcttcgaggatgtggatgtaattcacatggtggagggaatgcctgctttggctctctgcctctgtctcttctttcctccttttattcagctggtatttatgaagcccttgatagtaccaggacataccttgtcagggccgcacagccaggaaacagcagagctgggctctggcccaggactgacactattgaatttactgttccaacaatatatatctatccatccatccatccatccatccatccatccatccaagacaggtcttactctgtgccaggcacagatcccagaaaangcgcaaggcttgtgtgcagcatggaggtctcaggtgcatcctggcaatgccatcatcactgtctgctcatttaggagactccttattttcttcctaataatgtccatcatttcatgagcacctattgtatgctgtatgcttggggcttcacgtctatgcccaacaacaaccttataaggaggcaggataccgccgccatttgctagctctgcaacttggggtgagttacttaatctatcagggcctcagtttcctcatctaaaacatgagataataattgtagctccctcatagggttattgtgagaattaaatgacttagacacacaaa

SEQ ID NO: 3821 - DNA, 661 bp, Homo sapiens
  C9orf91
  misc_feature [331]..[331]: Chromosome 9, SNP identification no. = rs13293886
  misc_feature [331]..[331]: allele = a, in linkage disequilibrium with rs7027937, respectively
  misc_feature [331]..[331]: n is a, t, c or g
atttatgaagcccttgatagtaccaggacataccttgtcagggccgcacagccaggaaacagcagagctgggctctggcccaggactgacactattgaatttactgttccaacaatatatatctatccatccatccatccatccatccatccatccatccaagacaggtcttactctgtgccaggcacagatcccagaaaatgcgcaaggcttgtgtgcagcatggaggtctcaggtgcatcctggcaatgccatcatcactgtctgctcatttaggagactccttattttcttcctaataatgtccatcatttcatgagcacctattgtntgctgtatgcttggggcttcacgtctatgcccaacaacaaccttataaggaggcaggataccgccgccatttgctagctctgcaacttggggtgagttacttaatctatcagggcctcagtttcctcatctaaaacatgagataataattgtagctccctcatagggttattgtgagaattaaatgacttagacacacaaagtgtttataatagtacctggtgtaaagtaaatgctttgtaagtattaactgttattaactctgtttgccagtgaggaaacggaagttcagagaggttaagtaaccagtccatggccacacagcccttct

SEQ ID NO: 3822 - DNA, 661 bp, Homo sapiens
  C9orf91
  misc_feature [331]..[331]: Chromosome 9, SNP identification no. = rs7043865
  misc_feature [331]..[331]: allele = c, in linkage disequilibrium with rs7027937, respectively
  misc_feature [331]..[331]: n is a, t, c or g
gcacctattgtatgctgtatgcttggggcttcacgtctatgcccaacaacaaccttataaggaggcaggataccgccgccatttgctagctctgcaacttggggtgagttacttaatctatcagggcctcagtttcctcatctaaaacatgagataataattgtagctccctcatagggttattgtgagaattaaatgacttagacacacaaagtgtttataatagtacctggtgtaaagtaaatgctttgtaagtattaactgttattaactctgtttgccagtgaggaaacggaagttcagagaggttaagtaaccagtccatggccanacagcccttctcaggtcttcttttgggtctcagctccaggacctcctcctccctggatcccttgtcactcaggactatgcagatcccctcttcctgaccattgtcactcttactgttagcatcctctctgttgttacttgatgtctttgagagcatcaatgtctggcataactgtcttgttttccctttggctcactgttagcctttctcaggattggaagatttgggccgggcatggtggctcacacttataatcccagtactttgggaggctcaggtgggaggatcacttgggcccaggagtttgagaccaggctaggcaacattgtg

SEQ ID NO: 3823 - DNA, 661 bp, Homo sapiens
  C9orf91
  misc_feature [331]..[331]: Chromosome 9, SNP identification no. = rs7047560
  misc_feature [331]..[331]: allele = c, in linkage disequilibrium with rs7027937, respectively
  misc_feature [331]..[331]: n is a, t, c or g
aatcccagtactttgggaggctcaggtgggaggatcacttgggcccaggagtttgagaccaggctaggcaacattgtgagactctgtctctacaaaaaataaaatcagcggggtgtggtggcacatgcccatagtcctgggaggctgaggtgggaggattgcttgagcctaggagttcaaggctgcagtgagctctgatggcaacattatactccagcctgcctcaaaaaaaaaaaaaaaaaaaaaaaagattggctggtttgtaaaggcaggcaagtcctggcacattgctaggacacatgagaagttccaagttcctacaaatatttgnggctaatatggcacagtgaaaacacaatgatttaagttcactgtcatcctcactgtgatattatcagctgacatgtgttaagtgttcaattctttcaattattctacatggattaactcatttcatccttattatactcctctgaggtaggggcattattatctccatttgggggtaaggagatggaggcacagagatgtttagtaatttgcccaaggttatatgggcagtgagaggtacgttaggaattgaactattggtgatacagatttctagaaggaagaaatccacatcaaatccaaatccacatccaaatcttcttactacaga

SEQ ID NO: 3824 - DNA, 661 bp, Homo sapiens
  C9orf91
  misc_feature [331]..[331]: Chromosome 9, SNP identification no. = rs4979448
  misc_feature [331]..[331]: allele = a, in linkage disequilibrium with rs7027937, respectively
  misc_feature [331]..[331]: n is a, t, c or g
ggcaacattgtgagactctgtctctacaaaaaataaaatcagcggggtgtggtggcacatgcccatagtcctgggaggctgaggtgggaggattgcttgagcctaggagttcaaggctgcagtgagctctgatggcaacattatactccagcctgcctcaaaaaaaaaaaaaaaaaaaaaaaagattggctggtttgtaaaggcaggcaagtcctggcacattgctaggacacatgagaagttccaagttcctacaaatatttgcggctaatatggcacagtgaaaacacaatgatttaagttcactgtcatcctcactgtgatattatcngctgacatgtgttaagtgttcaattctttcaattattctacatggattaactcatttcatccttattatactcctctgaggtaggggcattattatctccatttgggggtaaggagatggaggcacagagatgtttagtaatttgcccaaggttatatgggcagtgagaggtacgttaggaattgaactattggtgatacagatttctagaaggaagaaatccacatcaaatccaaatccacatccaaatcttcttactacagatctaggcaaaacaaaatataattattcctcaattttcatagtagaggcattcctggaaaattcagt

SEQ ID NO: 3825 - DNA, 661 bp, Homo sapiens
  C9orf91
  misc_feature [331]..[331]: Chromosome 9, SNP identification no. = rs4978602
  misc_feature [331]..[331]: allele = c, in linkage disequilibrium with rs7027937, respectively
  misc_feature [331]..[331]: n is a, t, c or g
caacattgtgagactctgtctctacaaaaaataaaatcagcggggtgtggtggcacatgcccatagtcctgggaggctgaggtgggaggattgcttgagcctaggagttcaaggctgcagtgagctctgatggcaacattatactccagcctgcctcaaaaaaaaaaaaaaaaaaaaaaaagattggctggtttgtaaaggcaggcaagtcctggcacattgctaggacacatgagaagttccaagttcctacaaatatttgcggctaatatggcacagtgaaaacacaatgatttaagttcactgtcatcctcactgtgatattatcagntgacatgtgttaagtgttcaattctttcaattattctacatggattaactcatttcatccttattatactcctctgaggtaggggcattattatctccatttgggggtaaggagatggaggcacagagatgtttagtaatttgcccaaggttatatgggcagtgagaggtacgttaggaattgaactattggtgatacagatttctagaaggaagaaatccacatcaaatccaaatccacatccaaatcttcttactacagatctaggcaaaacaaaatataattattcctcaattttcatagtagaggcattcctggaaaattcagtgt

SEQ ID NO: 3826 - DNA, 661 bp, Homo sapiens
  C9orf91
  misc_feature [331]..[331]: Chromosome 9, SNP identification no. = rs4246902
  misc_feature [331]..[331]: allele = g, in linkage disequilibrium with rs7027937, respectively
  misc_feature [331]..[331]: n is a, t, c or g
aaaaaaaaaaaagattggctggtttgtaaaggcaggcaagtcctggcacattgctaggacacatgagaagttccaagttcctacaaatatttgcggctaatatggcacagtgaaaacacaatgatttaagttcactgtcatcctcactgtgatattatcagctgacatgtgttaagtgttcaattctttcaattattctacatggattaactcatttcatccttattatactcctctgaggtaggggcattattatctccatttgggggtaaggagatggaggcacagagatgtttagtaatttgcccaaggttatatgggcagtgagagntacgttaggaattgaactattggtgatacagatttctagaaggaagaaatccacatcaaatccaaatccacatccaaatcttcttactacagatctaggcaaaacaaaatataattattcctcaattttcatagtagaggcattcctggaaaattcagtgtacattaaactcatgcaaacaatcacgttaagtggctgggcgtgatggctcatgtctgtaatcccagcactttgggaggctgaggtgggagaattgcttgaacctaggagtttgagaccagcctgggcaacatagtgagactcgatctctacaaaaaatttaaaagttag

SEQ ID NO: 3827 - DNA, 661 bp, Homo sapiens
  C9orf91
  misc_feature [331]..[331]: Chromosome 9, SNP identification no. = rs2900587
  misc_feature [331]..[331]: allele = t, in linkage disequilibrium with rs7027937, respectively
  misc_feature [331]..[331]: n is a, t, c or g
ttatcagctgacatgtgttaagtgttcaattctttcaattattctacatggattaactcatttcatccttattatactcctctgaggtaggggcattattatctccatttgggggtaaggagatggaggcacagagatgtttagtaatttgcccaaggttatatgggcagtgagaggtacgttaggaattgaactattggtgatacagatttctagaaggaagaaatccacatcaaatccaaatccacatccaaatcttcttactacagatctaggcaaaacaaaatataattattcctcaattttcatagtagaggcattcctggaaaantcagtgtacattaaactcatgcaaacaatcacgttaagtggctgggcgtgatggctcatgtctgtaatcccagcactttgggaggctgaggtgggagaattgcttgaacctaggagtttgagaccagcctgggcaacatagtgagactcgatctctacaaaaaatttaaaagttagctgagtgtggtggcatgcatgtgtggtcccagctgcttgggaggctgaggtaggaagatctgagctcaggaggtcaagcctgcagtgagctgtgatcgtaccactgcattccaacctgggtgacagagcgagactaggtctccaaaaaaaaaaa

SEQ ID NO: 3828 - DNA, 661 bp, Homo sapiens
  C9orf91
  misc_feature [331]..[331]: Chromosome 9, SNP identification no. = rs2900588
  misc_feature [331]..[331]: allele = g, in linkage disequilibrium with rs7027937, respectively
  misc_feature [331]..[331]: n is a, t, c or g
ttcaattattctacatggattaactcatttcatccttattatactcctctgaggtaggggcattattatctccatttgggggtaaggagatggaggcacagagatgtttagtaatttgcccaaggttatatgggcagtgagaggtacgttaggaattgaactattggtgatacagatttctagaaggaagaaatccacatcaaatccaaatccacatccaaatcttcttactacagatctaggcaaaacaaaatataattattcctcaattttcatagtagaggcattcctggaaaattcagtgtacattaaactcatgcaaacaatcacnttaagtggctgggcgtgatggctcatgtctgtaatcccagcactttgggaggctgaggtgggagaattgcttgaacctaggagtttgagaccagcctgggcaacatagtgagactcgatctctacaaaaaatttaaaagttagctgagtgtggtggcatgcatgtgtggtcccagctgcttgggaggctgaggtaggaagatctgagctcaggaggtcaagcctgcagtgagctgtgatcgtaccactgcattccaacctgggtgacagagcgagactaggtctccaaaaaaaaaaaaaaaaaaatcactttaggtataaatgtaaactg

SEQ ID NO: 3829 - DNA, 661 bp, Homo sapiens
  C9orf91
  misc_feature [331]..[331]: Chromosome 9, SNP identification no. = rs12379659
  misc_feature [331]..[331]: allele = g, in linkage disequilibrium with rs7027937, respectively
  misc_feature [331]..[331]: n is a, t, c or g
cagctgcttgggaggctgaggtaggaagatctgagctcaggaggtcaagcctgcagtgagctgtgatcgtaccactgcattccaacctgggtgacagagcgagactaggtctccaaaaaaaaaaaaaaaaaaatcactttaggtataaatgtaaactggagttaggttggctgaccagagaattctaagtagatttttttttatctgcatgtatgctcagtgggacatttggaatccaggcagcccaggggacagtcttgaacatgcagaatggtttctaataggacatgtctttcagtggaaggcatgggttcagaacccctggccctcntccactaagtgccagcactgtccatcccatccctgtgacaaccaaagggtcctccttgcatttccaaaatctcccttacagggtgctgccccttttgagaactattattcttgatcaggctgctctcttctaactgagtctgaaagtcctcttgtgcttacttccccaaaccagcatttggggtcctcttgtccctcctcttctcccccacctgtttagcatccactctcccagctgaatgcgtggcgtccattggtttgggtaggagagcaggaggctgattcccagagccccacctgagggccaggcgctgtgttaggtactttaaag

SEQ ID NO: 3830 - DNA, 661 bp, Homo sapiens
  C9orf91
  misc_feature [331]..[331]: Chromosome 9, SNP identification no. = rs10817647
  misc_feature [331]..[331]: allele = t, in linkage disequilibrium with rs7027937, respectively
  misc_feature [331]..[331]: n is a, t, c or g
ttggaatccaggcagcccaggggacagtcttgaacatgcagaatggtttctaataggacatgtctttcagtggaaggcatgggttcagaacccctggccctcatccactaagtgccagcactgtccatcccatccctgtgacaaccaaagggtcctccttgcatttccaaaatctcccttacagggtgctgccccttttgagaactattattcttgatcaggctgctctcttctaactgagtctgaaagtcctcttgtgcttacttccccaaaccagcatttggggtcctcttgtccctcctcttctcccccacctgtttagcatccactntcccagctgaatgcgtggcgtccattggtttgggtaggagagcaggaggctgattcccagagccccacctgagggccaggcgctgtgttaggtactttaaagtaggtgctttctagatggagtgagtgcttcacttacacaacagatttgatgtgtcagctcaaacagatcaaacccatttgatctcccatcttccgcaaatatcttatgaaccttgacagagtcccaggccctgggttaagtactttacacacaatctcagtgaaatctcactccattcctaggaggcagacacattcttttattctacaactgaagaaaataaggttc

SEQ ID NO: 3831 - DNA, 661 bp, Homo sapiens
  C9orf91
  misc_feature [331]..[331]: Chromosome 9, SNP identification no. = rs756016
  misc_feature [331]..[331]: allele = c, in linkage disequilibrium with rs7027937, respectively
  misc_feature [331]..[331]: n is a, t, c or g
ggccaggcgctgtgttaggtactttaaagtaggtgctttctagatggagtgagtgcttcacttacacaacagatttgatgtgtcagctcaaacagatcaaacccatttgatctcccatcttccgcaaatatcttatgaaccttgacagagtcccaggccctgggttaagtactttacacacaatctcagtgaaatctcactccattcctaggaggcagacacattcttttattctacaactgaagaaaataaggttcagggaagggacataccttgtccagggccatatagctaggaagcagcagagctgggctttatcccagggctgtcngacactattgaatttactgttccaactatcccccatctcattttatttttcttcccttatttttaagagatagagtctcactctgtcacctaggctggagtgcagtggcacaatcatagcttactataacctcacactcctgggctcaagtgatcctctcgcctcaccctcccaagtagttgggactacaggtggatgctaacatgcctagttaatttttttttttttttttgagacagagtctcactctgttgcccaggctggagtgcagtggcgtgatctctgtgcactgcaacctctgcctcctgggttcaagcaattctcctgtct

SEQ ID NO: 3832 - DNA, 661 bp, Homo sapiens
  C9orf91
  misc_feature [331]..[331]: Chromosome 9, SNP identification no. = rs2418312
  misc_feature [331]..[331]: allele = t, in linkage disequilibrium with rs7027937, respectively
  misc_feature [331]..[331]: n is a, t, c or g
tcactccattcctaggaggcagacacattcttttattctacaactgaagaaaataaggttcagggaagggacataccttgtccagggccatatagctaggaagcagcagagctgggctttatcccagggctgtctgacactattgaatttactgttccaactatcccccatctcattttatttttcttcccttatttttaagagatagagtctcactctgtcacctaggctggagtgcagtggcacaatcatagcttactataacctcacactcctgggctcaagtgatcctctcgcctcaccctcccaagtagttgggactacaggtggntgctaacatgcctagttaatttttttttttttttttgagacagagtctcactctgttgcccaggctggagtgcagtggcgtgatctctgtgcactgcaacctctgcctcctgggttcaagcaattctcctgtctcagcctcccgagtagctgggactacaggtgtgtgtcaccacgcccagctaatttttgtattattagtagagaaggggtttcaccatgttggccaggctggtctcgaactcctgaccttgtgatccacctgcctcggcctcccaaagtgctgggattacaggcgtgaaccaccgcgcctggccccacgtagttaatt

SEQ ID NO: 3833 - DNA, 661 bp, Homo sapiens
  C9orf91
  misc_feature [331]..[331]: Chromosome 9, SNP identification no. = rs751780
  misc_feature [331]..[331]: allele = c, in linkage disequilibrium with rs7027937, respectively
  misc_feature [331]..[331]: n is a, t, c or g
tagcccaacataaaactgggccatcaggaagaggtaactatgagacacagcacctgaatcacactctggcatccttccactgtgtctgtcacccccagcagcacccggtgtctcaggagggctccattggcagctgccagcctcaggtccgtgttggtgttggcctgtaagacaaacgccaggcccatcaccagacctccatgctactggggagctcccaggctctgggcagtagaaacacaccatcccacccccagatgccaagggacaatccccaccctcaggactgtcccatttcctcccctattaaatggtcgggggtggaggcagncacagtgactcatgcctgtaatcccagtgttttgagagactaaggcaggagaatttcttgaagccaggggtttgaggccagcctggacaatgtagcgagatgccgtctctataaaaaattgtttaaaaattaactacgtggggccaggcgcggtggttcacgcctgtaatcccagcactttgggaggccgaggcaggtggatcacaaggtcaggagttcgagaccagcctggccaacatggtgaaaccccttctctactaataatacaaaaattagctgggcgtggtgacacacacctgtagtcccagctactcgggaggctgagacagg

SEQ ID NO: 3834 - DNA, 661 bp, Homo sapiens
  C9orf91
  misc_feature [331]..[331]: Chromosome 9, SNP identification no. = rs3810935
  misc_feature [331]..[331]: allele = t, in linkage disequilibrium with rs7027937, respectively
  misc_feature [331]..[331]: n is a, t, c or g
aggggaggaaatgggacagtcctgagggtggggattgtcccttggcatctgggggtgggatggtgtgtttctactgcccagagcctgggagctccccagtagcatggaggtctggtgatgggcctggcgtttgtcttacaggccaacaccaacacggacctgaggctggcagctgccaatggagccctcctgagacaccgggtgctgctgggggtgacagacacagtggaaggatgccagagtgtgattcaggtgctgtgtctcatagttacctcttcctgatggcccagttttatgttgggctaatggagagcagtggcctcatgttctnccagcctacacagtgtttgcagtagtctgctaatgagatggctgttggcagccctttccttcctccctgccctggtgtttcttcctcaagacaccttctctgtgcagtaaccagtggcctggaacctccacgtggcagggctggaagggaagcacagataatgtccacaccttgctgctcacctggcatttattcagcagacggagcctcctctgtgctgtgccctcggttggacactggcgacattgaggggcccatgcaaggtccctgtcctggcagaggatgacaggcatacagtgagacagtcaacagtagcctctctggccttat

SEQ ID NO: 3835 - DNA, 661 bp, Homo sapiens
  C9orf91
  misc_feature [331]..[331]: Chromosome 9, SNP identification no. = rs10982342
  misc_feature [331]..[331]: allele = g, in linkage disequilibrium with rs7027937, respectively
  misc_feature [331]..[331]: n is a, t, c or g
tacacagtgtttgcagtagtctgctaatgagatggctgttggcagccctttccttcctccctgccctggtgtttcttcctcaagacaccttctctgtgcagtaaccagtggcctggaacctccacgtggcagggctggaagggaagcacagataatgtccacaccttgctgctcacctggcatttattcagcagacggagcctcctctgtgctgtgccctcggttggacactggcgacattgaggggcccatgcaaggtccctgtcctggcagaggatgacaggcatacagtgagacagtcaacagtagcctctctggccttatagcaaanggacagcccccaacaaggctgagaggcaaggtacacagggtccctttgaagggctgcatggagctcaccatggctggggctataccagagtgacacagcggggagagatgaggccggagaggcaggtcagatgctgaaggccttgtttgcctggcttggtcattctctttgccccgaaggttggggggagatctgaaagtgactagtatggcgtggcagggtgggtcagaacacagttaggccagatctcctgatcctggctgaactctcctgttcctccatccatgcctgatctgcccagtggaattgcaaaacctccttggcaccaca

SEQ ID NO: 3836 - DNA, 661 bp, Homo sapiens
  C9orf91
  misc_feature [331]..[331]: Chromosome 9, SNP identification no. = rs10982343
  misc_feature [331]..[331]: allele = c, in linkage disequilibrium with rs7027937, respectively
  misc_feature [331]..[331]: n is a, t, c or g
gacaccttctctgtgcagtaaccagtggcctggaacctccacgtggcagggctggaagggaagcacagataatgtccacaccttgctgctcacctggcatttattcagcagacggagcctcctctgtgctgtgccctcggttggacactggcgacattgaggggcccatgcaaggtccctgtcctggcagaggatgacaggcatacagtgagacagtcaacagtagcctctctggccttatagcaaacggacagcccccaacaaggctgagaggcaaggtacacagggtccctttgaagggctgcatggagctcaccatggctggggctanaccagagtgacacagcggggagagatgaggccggagaggcaggtcagatgctgaaggccttgtttgcctggcttggtcattctctttgccccgaaggttggggggagatctgaaagtgactagtatggcgtggcagggtgggtcagaacacagttaggccagatctcctgatcctggctgaactctcctgttcctccatccatgcctgatctgcccagtggaattgcaaaacctccttggcaccacatctgcattctcaccagtcatggccccttgcctggtgggagcccagaggtaggtgtgcacgggggacctgggaagaggctcctc

SEQ ID NO: 3837 - DNA, 661 bp, Homo sapiens
  C9orf91
  misc_feature [331]..[331]: Chromosome 9, SNP identification no. = rs10982345
  misc_feature [331]..[331]: allele = t, in linkage disequilibrium with rs7027937, respectively
  misc_feature [331]..[331]: n is a, t, c or g
cacctggcatttattcagcagacggagcctcctctgtgctgtgccctcggttggacactggcgacattgaggggcccatgcaaggtccctgtcctggcagaggatgacaggcatacagtgagacagtcaacagtagcctctctggccttatagcaaacggacagcccccaacaaggctgagaggcaaggtacacagggtccctttgaagggctgcatggagctcaccatggctggggctataccagagtgacacagcggggagagatgaggccggagaggcaggtcagatgctgaaggccttgtttgcctggcttggtcattctctttgcnccgaaggttggggggagatctgaaagtgactagtatggcgtggcagggtgggtcagaacacagttaggccagatctcctgatcctggctgaactctcctgttcctccatccatgcctgatctgcccagtggaattgcaaaacctccttggcaccacatctgcattctcaccagtcatggccccttgcctggtgggagcccagaggtaggtgtgcacgggggacctgggaagaggctcctcatgcacctgcctcagttcctccacgaatgtttattgagagcctattgtgtaccaggcactgtcccagggattgaggctgcagcagagaac

SEQ ID NO: 3838 - DNA, 661 bp, Homo sapiens
  C9orf91
  misc_feature [331]..[331]: Chromosome 9, SNP identification no. = rs12555934
  misc_feature [331]..[331]: allele = t, in linkage disequilibrium with rs7027937, respectively
  misc_feature [331]..[331]: n is a, t, c or g
gatcacctgagcgcgggatgtcaaggctgcagtgagctgtgatcgcgccactgcgctccagcctgggtgccagagtgagaccctgtctcaaaaaaaaaagaatggacacatctttttagacaacttgagtctttcagtttctaaatagtatcttgggatgaggtgatacactatctggcatgtccttcagattcactggggggtgcagtggaggttggggtgttggggacgggtaccgagtgaggatggagatgaaccaagagtggccatgaggtgacctaacagttgcagcgggaggatgggttgctgtcatctacttctgaatatgctnggaaattttcatagtaaaaagctttaaaggaaccatttgagaaatcctcccttgtgggtatgacattgggagactagttggcaagaaggctgtgactttgggtctcatgggtcagtcagtgggaggaaggaggtctgggaaccagaggaggtggccagtggatgggagtttggggcaagggccaccagtttctccaagaacttcaattaggatgtgtggcagctgtggtcttgacaggttgtcgtaatgtgaatgtggaagatttcagcctggttaaatttagcttggccggcccctggggtggaaggggaggcacaggtggggtacgga

SEQ ID NO: 3839 - DNA, 661 bp, Homo sapiens
  C9orf91
  misc_feature [331]..[331]: Chromosome 9, SNP identification no. = rs2900590
  misc_feature [331]..[331]: allele = t, in linkage disequilibrium with rs7027937, respectively
  misc_feature [331]..[331]: n is a, t, c or g
cctgaggctgagccggaggtaacaggcactggggcttgttggggccatcttccctcgggggaatttgcatagagaaagcctatgtgggggcttcttagattccccaagacatgcttctctcagttagtagacaccacacaaatctagctcaggagttttcaatcttttcattcttcaccctagcacttaaaaagatagttaacaggaagcattttatatttattgggactttttgttgcattatttaatatcttggatattctttttgatggttgcattggatgggtagttgcatgttgatagattatagcttacttaaccatgaacatantgatgaacatttgggtctcagtcaatcaattatttattcatctatccaaccattcatccatctactttaattgcagttagacagttgactcttctttgaatttttttttgtttagaacagggtctcactcccgtcacccaggctggggtgcagtggtgtgatcactgctcattatggcctcaacttcccaggttcaagcaatcctcccaccttagtctcctgagtagttgggactgtaggcatgtgccaccacacctggctaattttttgtatttttattagaggcagggttttgccatgttgcccaggctggtctccaactcctgggct

SEQ ID NO: 3840 - DNA, 661 bp, Homo sapiens
  C9orf91
  misc_feature [331]..[331]: Chromosome 9, SNP identification no. = rs10817652
  misc_feature [331]..[331]: allele = g, in linkage disequilibrium with rs7027937, respectively
  misc_feature [331]..[331]: n is a, t, c or g
tactgtgtctttaaaaaagaaaaaaaaaagtacattacattcaattttttaatccttttttacttaaaattgttttattgtggcaaatatacataatataaaatgtaccatcttaaccattttaagtatatagttcagcagcatgaggtacattcacatcgttatgcaaccatcaccatcagccatctgcagaatgttttcctcttcccaaattgaagctctgtgctcattaaacactaacttccccttccctccttcctccccaccctcaacccctagaaaccaccattttactttctctccctgtgaactgattactctaggtgcctcntattagtggaatcatacagtacatgtccttttgtgataaacctaatttttataagcaatctcttttttcccttttttatgtttttctttctttttttttactgtcagtgatcatatttaaatgtaagcagtttcttttaatatgttaggagtacttgtgtaaagaaatctaccaggtaccttgtatgaattaactaattctgctataatgggaatattcctctccccacctccacatttaactagtaattttcttcaagtgagtcactttgatctcatgtactttacagactcatagacatttgaaagtggaaaaaatgtatttgtggct

SEQ ID NO: 3841 - DNA, 661 bp, Homo sapiens
  C9orf91
  misc_feature [331]..[331]: Chromosome 9, SNP identification no. = rs7027937
  misc_feature [331]..[331]: allele = c, t
  misc_feature [331]..[331]: n is a, t, c or g
gtggaaaaaatgtatttgtggctggctaggtttactttctttttatatttttaaaatatatttttaattttaattttatttttgtagagacagagtctcgctctgttgcccaggctggtctcaaactcctgacctcaagtgatcttcctacctcggcctcccaaagtgctgggattacaggtttgaacaaccatgcctggccagctaggcttaaaaaattagataattagaaatttggtaatttctctagggcttcgaggttgcatattttttttgtgcgtattattattgccattcagcagttagttactcaccttggcaacgaggacantgaggctgcaggagccccacaggccatgagttgcagaactgggcttctggaccaggctggcatcttctgagagtcctaggtgctgacctggcctggttcttcctagagagcatcactgctgggtccaggggcaagaaagcagcatgtccttcccctggtgcctaagccctttttcctcaaggggctcccctgtggtattcaatctgcttccctgcctcttctaggaaatggcccgccagctgctggcagtgtttggcggctactacatccggcttctagtgacctcccagctccctcaggcaatggggacacgacacacgaactctccga

SEQ ID NO: 3842 - DNA, 661 bp, Homo sapiens
  C9orf91
  misc_feature [331]..[331]: Chromosome 9, SNP identification no. = rs2183018
  misc_feature [331]..[331]: allele = g, in linkage disequilibrium with rs7027937, respectively
  misc_feature [331]..[331]: n is a, t, c or g
ggcattgccttgaacccctaaaattatcagacttcctttttccaatataaagaaaaaaagtaagttttcagaattctctcaatttttaagtttttctcccccatattttgtgaaaagcagtggtatgtgtacgtgttgtctaccagtacacaggctgcagaagacagagacagaagaaagagatcaagggcagataactgttgataggaatatttgagaaagattgatcctgtttgacttgaggacttattttgttcacaggcatgcacgcttgtggttgtggttttatattacagatgtagaacaatggttatgtttcccgacatgaacnttgtcctggaatgaagtgtgatcagccacttgtggaattctttgaagagctcagaggcttccaagtgatctgctcctgaacaagtttgaagacctattgtttcatagacccaagaccaaacgcatctaaaggatccccagcccccaagacctagcctttgtctgcgattttggcttcatctcccacaaaacccctttatgagttcacgctctttcctggactgacatacctattcctttccatttgttggactcctattcatgcttcaaagtccagctttcttaagcccttctttaggaagccttcccacacagccaaccctgctgctct

SEQ ID NO: 3843 - DNA, 661 bp, Homo sapiens
  C9orf91
  misc_feature [331]..[331]: Chromosome 9, SNP identification no. = rs1058278
  misc_feature [331]..[331]: allele = g, in linkage disequilibrium with rs7027937, respectively
  misc_feature [331]..[331]: n is a, t, c or g
agattgatcctgtttgacttgaggacttattttgttcacaggcatgcacgcttgtggttgtggttttatattacagatgtagaacaatggttatgtttcccgacatgaacattgtcctggaatgaagtgtgatcagccacttgtggaattctttgaagagctcagaggcttccaagtgatctgctcctgaacaagtttgaagacctattgtttcatagacccaagaccaaacgcatctaaaggatccccagcccccaagacctagcctttgtctgcgattttggcttcatctcccacaaaacccctttatgagttcacgctctttcctggnctgacatacctattcctttccatttgttggactcctattcatgcttcaaagtccagctttcttaagcccttctttaggaagccttcccacacagccaaccctgctgctctctgcctcctttaaattcttgatacagctgctgcttgttctgatgttttatggtattgattctgttttcctgtgtatatgccagtttttctagctagactgtaaactccttaaggacagagactacaccttgtactttttgtgcatgacctggacctgctaaggaaaaaaaaatcttgtggattgattgctttgccatccccacagcagcttttgcaaatt

SEQ ID NO: 3844 - DNA, 661 bp, Homo sapiens
  C9orf91
  misc_feature [331]..[331]: Chromosome 9, SNP identification no. = rs1058280
  misc_feature [331]..[331]: allele = t, in linkage disequilibrium with rs7027937, respectively
  misc_feature [331]..[331]: n is a, t, c or g
ttgtgtgaccttggctaagtcacttaacctttctgattgtcatttcgctttttaataaagtgggtctggtgaacaagaaatgtaataaacacgtggcttgccattcaagagatgagtctgaccattcactttctgtgtgccagagaagagagatcatgggtatagaccagcccctggaaaggctgctttggtcaaggctgagagcagctttgctcaaggaaattattcacgaaggtgaccactgtctttctgacctggcacagaggaaatgttggctgtgaatgtgaccaatagaaagaagcccgtatttctcagtcagtcctagaacccnggtaagtaattaacagagaataaaaatgtgtttgttaaatgacaaagcagcagtttttcaattgtaaggtctgcttgagagcctttgatgtgtgtttcttttcctgacttttcctttctttagaatttttgatggtctcacctggtgggtggggctttcagggtatgcccacaatgtacatttctcggcatctgtgcctcagtttcctcatttataaaatccctatgatctctgtctcacctactttacagggttgctgtgaagatcgcatactacacacaggaatgctcatcagtttttaaattttatttaatttttatttattttttt

SEQ ID NO: 3845 - DNA, 661 bp, Homo sapiens
  C9orf91
  misc_feature [331]..[331]: Chromosome 9, SNP identification no. = rs2418315
  misc_feature [331]..[331]: allele = g, in linkage disequilibrium with rs7027937, respectively
  misc_feature [331]..[331]: n is a, t, c or g
aaggctgctttggtcaaggctgagagcagctttgctcaaggaaattattcacgaaggtgaccactgtctttctgacctggcacagaggaaatgttggctgtgaatgtgaccaatagaaagaagcccgtatttctcagtcagtcctagaaccccggtaagtaattaacagagaataaaaatgtgtttgttaaatgacaaagcagcagtttttcaattgtaaggtctgcttgagagcctttgatgtgtgtttcttttcctgacttttcctttctttagaatttttgatggtctcacctggtgggtggggctttcagggtatgcccacaatgtncatttctcggcatctgtgcctcagtttcctcatttataaaatccctatgatctctgtctcacctactttacagggttgctgtgaagatcgcatactacacacaggaatgctcatcagtttttaaattttatttaatttttatttatttttttttaaatgtaattttttcagagagataaggtcttgctatgttacccagcctagtcttgaactcctggcctcaagtgatcctcctgccttggcctcccatgctgctgggattacaggtgtgaactaccatgcccagccagctcctaagtcttaaggctctgtgttagtgatagatgtggc

SEQ ID NO: 3846 - DNA, 661 bp, Homo sapiens
  misc_feature [331]..[331]: Chromosome 9, SNP identification no. = rs10759729
  misc_feature [331]..[331]: allele = t, in linkage disequilibrium with rs7027937, respectively
  misc_feature [331]..[331]: n is a, t, c or g
aacttgagtgaaagctcaataaattgttacttaaaaaattttttgtctcgcatattgtagatacctgatgtatatttttgttgatctagcaggtcattaaccgttaaggttattcagtctgcctcagacctcagctatttcagtgccatggggtatatttatgtcaataaagattttagtcaaatctctggaattcagcatccagagataatatagcaaggagataaagagcaagctggtgactttgggccagatactcactcttactgtactttctgtacctaatttcctcatgtattaaggggggagtgtgataataagggggattaangggagtgattgatgtgaagcacaaagcctggtccacagtaagggctcagtcagtgggggcgtttcttctgcagctgctggctgctgttggctcctagtttatgttatcctatgttatcttatagttgagtgtttttacacttaggtctgtgattcattttgagttagtttttctgaaggttgtaaggtctccatctggattaattttttgcatattgttccagcaccatctgttgaaaagactctctttgctccattgtattgcctttgctttttttttttttttttcaaggatcagttgactatacttatgtgggtctatttctgggct

SEQ ID NO: 3847 - DNA, 661 bp, Homo sapiens
  misc_feature [331]..[331]: Chromosome 9, SNP identification no. = rs10982351
  misc_feature [331]..[331]: allele = c, in linkage disequilibrium with rs7027937, respectively
  misc_feature [331]..[331]: n is a, t, c or g
catattgttccagcaccatctgttgaaaagactctctttgctccattgtattgcctttgctttttttttttttttttcaaggatcagttgactatacttatgtgggtctatttctgggctctctatttgttccattgatctatgtgtctgttctttcccaataacacactgtcttgattactgtagctttatagtaagtcttgaaattgggtagtgtgagtcctccaacttagttcttctctcccaatgttgatttggctattgtgtgtcttatgcctttccatgtaaactttagaatcagtttgtcaatatccacaaactaactcactgnttattttgattgggattgcatcaaatccatagatcaagttgcaagaactgacattttcacaatattgatttctatccacaaacatagaatctgtcttcatttatttagttgttctttgatttcttttatcagttttgtaggggtttttcccttttcctacagtttttttttttttggtaatttttcttatagatcttgtacatattttgttagatttataagatttatacctaaatatcttatttttgggggtgctaataaaaatagtattgtgtatttagtttcaaatttcatttgttcattgctagttatgggaaagtgattgaattt

SEQ ID NO: 3848 - DNA, 661 bp, Homo sapiens
  misc_feature [331]..[331]: Chromosome 9, SNP identification no. = rs10817653
  misc_feature [331]..[331]: allele = g, in linkage disequilibrium with rs7027937, respectively
  misc_feature [331]..[331]: n is a, t, c or g
caggctggagtatagtggtacaatctcagctcactggaacctccacctcctgggttcaagcaattttcctacctcagcctcccgaatagctgggattacaggcctgcacaaccatacctgactaatttttatatgttttatttttttatttttttatttttatttttctttagtagagatggggtttctccatgttggccagcctggtctcaaactcctgaccttaggtgatctgccctccttggcctcccaaagtgctgggattacaggcgtgagccaccatgcctggcattcactattaaatataatgttagctccggactttctggtnggttttttttgttttattttgttttattttgagacagtgtcttgctccatcaccaggctggagtgcagtggcccgatctcacctcactgcaacctctacttcctgagttcaagcaattctcctgcctcagcctctggagtagctaggactataggcgtgtgccaccacgcccagctaatttttttgtgtttttagtagagatcgggtttcaccatgttggccaggatggtcttgatcacttgaccttgtgatccgcccgcctcagcctcccaaagtgctagggattacaggtgtgagccaccattcccggccctagtaggttttttgttt

SEQ ID NO: 3849 - DNA, 661 bp, Homo sapiens
  misc_feature [331]..[331]: Chromosome 9, SNP identification no. = rs10982355
  misc_feature [331]..[331]: allele = g, in linkage disequilibrium with rs7027937, respectively
  misc_feature [331]..[331]: n is a, t, c or g
gcctcctgagtagctgggaccacaggcatgcaccaccatgcttggctaccaaaaggtagagacagggttctgtcatgttgatgttgctcagtttggtcttgaactcctgagttcaggtgatccacccaccttggcttcccaaagtgctgagattacaggcgtgagccactgtgcctggcctgggccaccacatccagccataattttttagttttttgtagagatggggtctcactatgttgcccaggctgatcttgaactcctggagttgatcctcccacctcagccttccagagtgttgagatttcaggcctgagccaccatgcctagntgagatattctttaacaagttgagaaagtttcttctctattccttgcttactgagaggaaattagctttcttttgattagtcattgcgtagtatatctttgttcatccttttacttttgaccttttcacattcttatatttaaggtttcacccttgtaggcatgtaagatttgcttttttgaaattaagtttttttctaattcaaagtatttactacactatatctaatgtgtttactgatagacttaggtttgaatgtaccatcttactaataattctttctatcggtttttctgttactgtgttcttttcttttttctgtcttttttc

SEQ ID NO: 3850 - DNA, 661 bp, Homo sapiens
  misc_feature [331]..[331]: Chromosome 9, SNP identification no. = rs10817654
  misc_feature [331]..[331]: allele = g, in linkage disequilibrium with rs7027937, respectively
  misc_feature [331]..[331]: n is a, t, c or g
ggtctcactatgttgcccaggctgatcttgaactcctggagttgatcctcccacctcagccttccagagtgttgagatttcaggcctgagccaccatgcctagatgagatattctttaacaagttgagaaagtttcttctctattccttgcttactgagaggaaattagctttcttttgattagtcattgcgtagtatatctttgttcatccttttacttttgaccttttcacattcttatatttaaggtttcacccttgtaggcatgtaagatttgcttttttgaaattaagtttttttctaattcaaagtatttactacactatatctnatgtgtttactgatagacttaggtttgaatgtaccatcttactaataattctttctatcggtttttctgttactgtgttcttttcttttttctgtcttttttccttgttttggattaaggttgtttgttttgggtaatttctcctttattagcatatgaagtatacttttctttcagttcttaccctagatttaacaagcatccttgacttactgaagtgtattatacatgatcacttctatcatttcctggataacccagcgactacacaattttttttttttttttttttggagacggagtctccctctgtggcctgggctagagtgc

SEQ ID NO: 3851 - DNA, 661 bp, Homo sapiens
  misc_feature [331]..[331]: Chromosome 9, SNP identification no. = rs10817655
  misc_feature [331]..[331]: allele = c, in linkage disequilibrium with rs7027937, respectively
  misc_feature [331]..[331]: n is a, t, c or g
gatattctttaacaagttgagaaagtttcttctctattccttgcttactgagaggaaattagctttcttttgattagtcattgcgtagtatatctttgttcatccttttacttttgaccttttcacattcttatatttaaggtttcacccttgtaggcatgtaagatttgcttttttgaaattaagtttttttctaattcaaagtatttactacactatatctaatgtgtttactgatagacttaggtttgaatgtaccatcttactaataattctttctatcggtttttctgttactgtgttcttttcttttttctgtcttttttccttnttttggattaaggttgtttgttttgggtaatttctcctttattagcatatgaagtatacttttctttcagttcttaccctagatttaacaagcatccttgacttactgaagtgtattatacatgatcacttctatcatttcctggataacccagcgactacacaattttttttttttttttttttggagacggagtctccctctgtggcctgggctagagtgcagtggtacgatcttggctcactgcaacctccgcctcccaggttcaagtgattctcccgcctcagcctcccgagtagctggaattgcaagtgtgcaccaccacaccct

SEQ ID NO: 3852 - DNA, 661 bp, Homo sapiens
  misc_feature [331]..[331]: Chromosome 9, SNP identification no. = rs4615654
  misc_feature [331]..[331]: allele = t, in linkage disequilibrium with rs7027937, respectively
  misc_feature [331]..[331]: n is a, t, c or g
ctcaatatttaattgtactgcttttaaagtttatgtctgcaaactctaatatctggttcttttttttttccttttgcttttcagtcagttggtcttattttttgatattcatggtaatttttcattaaatgctagacattttgaaaaatgaaaattttgaaaaattgaagagatatacaaggctctggatcttccctcaggcaggatttacttttgcttctgggaaaagtaggcttgagataaacttgaccctgggctttgtgagagctagtctaggtgtgattaaaccttactctcaggttgtagccctacaggggttttagctgaaaangtgtgtgtgtgtgtttataaaaccaggactcctctttcatggtgagtcctaaacctccaatttttgttaccccaagctgtgagacattttttttttttttttttttttttgagacagagactcgctctgtctcccaggctggagtgcagtggcatgatcttggctcactgcaagctccgcctcccaggtccacgccattctcctgcctcagcctccccagtagctgggactacaggcgcccaccaccacacgcggctaattttttgtatttttagtagagacggggtttcactgtgttagccaggatggtcttgatctcctgaccttgtg

SEQ ID NO: 3853 - DNA, 661 bp, Homo sapiens
  misc_feature [331]..[331]: Chromosome 9, SNP identification no. = rs7028121
  misc_feature [331]..[331]: allele = a, in linkage disequilibrium with rs7027937, respectively
  misc_feature [331]..[331]: n is a, t, c or g
cctgcctcagcctccccagtagctgggactacaggcgcccaccaccacacgcggctaattttttgtatttttagtagagacggggtttcactgtgttagccaggatggtcttgatctcctgaccttgtgatccacctgtctcggcctcccaaagtgctgggattacaggcgtgagcccccacgcctggccgctgtgagacttctgaaagctctactcaacttttcagctacttggactctgcttaggactcggcaggtgcctcaaggggataagaaggcttcggtgctcatctcctctctctacttttctcttcagcatcttggcccctcntgtcctgactatgttgatatctctctgatgcattcaaacacatttaagaaaaaagaacaattgcttttaaactgctgtcagcaggagggttggtctgatacaagctagtttaccatgatcagaagtaaatccagctgtggtttccatgattatttttattgttactatttgaaaatccttcaaagaaagatgtcaccctgtggctgagagccctttaaaaaagtcacaggatggaggcttctttgcatcccttctgtgaaggagtttctaaattatcaaagcaggaagtgacatttaaggagcatcttttttgtgtaaagcacctgctac

SEQ ID NO: 3854 - DNA, 661 bp, Homo sapiens
  misc_feature [331]..[331]: Chromosome 9, SNP identification no. = rs752858
  misc_feature [331]..[331]: allele = t, in linkage disequilibrium with rs7027937, respectively
  misc_feature [331]..[331]: n is a, t, c or g
catttaaggagcatcttttttgtgtaaagcacctgctacagttgttgcagaaagcagtccaagaaataaggaatatggggtttgctggggaaggaaagtgggaccttcgcatgagaggaggtgaggaatgcataggacaaggggaatctgggtaagagggtgggtccaggggatacagtatgagaatgggcagtggaagaggactctggacatgaggtccgggaaagtgaactgtatcttcacccaacagatgccagtggggtctcatcccatggggaagaggtgccacgatgcagtgagctgacaactccacacacatgttgtaggcctntctgcttccttccagctatagttcttttaccttttcctgctaaatattgccaaccttcttaatatggtcatctggatgtcccataggcccctccagcttggaatagcccaaaattaagtgatctgctgttgttgtcaacttggcctcaataccacaaggacctcattccctagaatcttctttcctgtatggttctgagttagaattggccagctttgcctgagaaatatgactcaaggtcctcttattcatcctgactgctgctgccctactttaggcctgtatcactgtctgtcctgattgcctaggcagtcgcttaatttgttttgt

SEQ ID NO: 3855 - DNA, 661 bp, Homo sapiens
  misc_feature [331]..[331]: Chromosome 9, SNP identification no. = rs10982358
  misc_feature [331]..[331]: allele = c, in linkage disequilibrium with rs7027937, respectively
  misc_feature [331]..[331]: n is a, t, c or g
gaggcacacctatttgtgggggcactaggagaagctgctagttgccaagtgctactgaccaccatcctctgcaggattcctgttctggaaaagttgcctgcactgcgggagggtgatgttggagaagctgtgagctctgtgctgttaagatgagcccagcacaaccagaaaggaaggcctcttcctcctccaatgtctctagctccccctcctgacagagcctagcattgcaccaactaccaaaagaaaaatatttaaagggccagctccatttttgaagagcaggcgatgaacagtaaatttggggtccagagtaataactgaatgtcantctaccattatcgaggggccgcataaccaagttgttaagagtgtggactctgcagttgggtttcttgagttaaagtcttagctctggcacttaatgtgagttagtgtaaaccttaaaagatttatttaacctgtgtctcacttccctaatctgtaaaatcaggtagtaacagttctaaccttgttgggttattgtgctgattgggttgatatttatgaagcacttggaagaggatctggcacagagtaagcaaggaaccaggctgtctattgtgattactattacactcaaatcgtggtggcatgcgcctgtagtcctagctacttggga

SEQ ID NO: 3856 - DNA, 661 bp, Homo sapiens
  misc_feature [331]..[331]: Chromosome 9, SNP identification no. = rs9775854
  misc_feature [331]..[331]: allele = g, in linkage disequilibrium with rs7027937, respectively
  misc_feature [331]..[331]: n is a, t, c or g
aattaggccgggcgcggtagctcacgcctgtaatcccagcgttttgggaggctgaggcgggcggatcacctgaggtcaggagttggagaccagcctgatcaacatggagaaaccctgtctctactaaaaatacaaaattagccaggcatggtggagggtgcctgtaatcccagctactcaggaggctgaggcaggagaatcgcttgaacccgggaggcagaggttgctgtgagccgaaagtgtgccattgcactccagcctgggcaacgaaagagaaactccgtctcaaaaaaaaaattaaaaaaaaaaattagctgggtgtggtggcacnttcctgtagctacttgggaggctgaggcaggagaatccttgaacctgggaggtggaggttgcagccagccaagatcatgccactgccctccaggctgggtgacagagcaagactccgtctcagacaaacagacaaacaaacaaaaaaagtgttgtcttccaactcgccttgtttgttatggtctgaatgttaatgttcccccaaattcatgtgttgaaatcttaactcccaaggtgatggtataagaattgtggtctttgggaggtttaggaggattaggtcatgagagcagagccctcacgattgagattagtgcccttatgaaagagc

SEQ ID NO: 3857 - DNA, 661 bp, Homo sapiens
  misc_feature [331]..[331]: Chromosome 9, SNP identification no. = rs10817661
  misc_feature [331]..[331]: allele = a, in linkage disequilibrium with rs7027937, respectively
  misc_feature [331]..[331]: n is a, t, c or g
gtgtgccattgcactccagcctgggcaacgaaagagaaactccgtctcaaaaaaaaaattaaaaaaaaaaattagctgggtgtggtggcactttcctgtagctacttgggaggctgaggcaggagaatccttgaacctgggaggtggaggttgcagccagccaagatcatgccactgccctccaggctgggtgacagagcaagactccgtctcagacaaacagacaaacaaacaaaaaaagtgttgtcttccaactcgccttgtttgttatggtctgaatgttaatgttcccccaaattcatgtgttgaaatcttaactcccaaggtgatngtataagaattgtggtctttgggaggtttaggaggattaggtcatgagagcagagccctcacgattgagattagtgcccttatgaaagagcctgagagagaccccttgccccttctgctatgtgagaacacagcaagaagcgccctctatgaggaacaggccctcaccagacactgatgctgctggagttttgatcttggacttcccagcctccaaaactgtgagaaataaacttctgttgtttgtaagtcacccggttatggtatcttattttagtagtctgaacagactaaggcactgttcatagtacaaaagttggaaatcaggctg

SEQ ID NO: 3858 - DNA, 661 bp, Homo sapiens
  misc_feature [331]..[331]: Chromosome 9, SNP identification no. = rs1055110
  misc_feature [331]..[331]: allele = c, in linkage disequilibrium with rs7027937, respectively
  misc_feature [331]..[331]: n is a, t, c or g
gatcattcttagctcatacaagcaaacttttatttttaaagagattaatgatttgaggagtctctgagtggagtatggccaagataggttatacgcgcatcactcaaagcctttacccaggataagtttattcctctgttctttcagatctgaacacaaattctctccacagtgctgtaccaaaaagacatccacgcctcccctatgacaaccgcatgatgctcaaggcgtgcatccttaggaggccatgagcattctagccggcggcacccacgtggtccctgcggctgcacagctgctgggcttccatgaggaagagggcagtggacangagtcatgaagactgattcagaaactcccctgcaggaggagaagacgtctgagccatccctgtgccaccaccaagagtcactccagcttctgaaaaagccaccgtgggggggagccgcctccaattaaagtccttggtcacatcagaggaagtgtctctcctccttccccctttgccagccctacctctgagattcccaaaaacatggagcaattagaccctggcacctcttggaaagaaatgtggttttgtcattttaacgcattaacacatttgtttcagtcactcctaaccaacctaacagggaagtgctatattaggagaggccag

SEQ ID NO: 3859 - DNA, 661 bp, Homo sapiens
  misc_feature [331]..[331]: Chromosome 9, SNP identification no. = rs1887784
  misc_feature [331]..[331]: allele = g, in linkage disequilibrium with rs7027937, respectively
  misc_feature [331]..[331]: n is a, t, c or g
actggcctccctttcttatctggaaaatgggaacagtaataccaccttggagtaatgagtgtttaattgtctgtaaactggccgctctgatgggaggtaccccaaagtactttctgtgctcattgtcttcccatatggtttgttggctccattattccagctgggcccaggtcccacaggagcatgatgatgaagcccagctttgctggtcccagtcctggcactgccactaacttgctgtgtggctttgggctagcccatactgaggccccccgcatctgcaacaggaagtcagtgggctgcgtcatctatctttccaaggattctcccngctctgatgaccgaaggttgtaagtctatgttattcccaacctcctttctcttttccaggctctggccatctgctgttgctcccctttctctgtggccaaagccccactctggaaatttccatcatcggtggtcgtgtgtcgatcacagcacactgggttcactccatggcctcatccttgggtagtgagttcccacccgtccagtgctcctctccagcctcagtcaccagcatctcctacttggattattgcaacggctcctaagcatcagcattaagcaccaacacagatgaatcctcctcctacagacattagatcatgtcacacct

SEQ ID NO: 3860 - DNA, 661 bp, Homo sapiens
  misc_feature [331]..[331]: Chromosome 9, SNP identification no. = rs1556146
  misc_feature [331]..[331]: allele = t, in linkage disequilibrium with rs4836648, respectively
  misc_feature [331]..[331]: n is a, t, c or g
caccccccgaccaagtccttgagtttagttcaatctgagttcattgagcacctactatgtgaccaatctcatgctgggcactatgaccaaagaggcaagcaaggcacagtgcccaccccagagggctctcagtgacatgaggaggcagcctcaagttcagatctctttgggccaatccagtcagtgaaaagcacatttctgttccaagggagggcaatgaaagggtctggggggtcagggaggcttcctgggggaggcgaataaaggtgggcaggacagttcagagaatgggagccacacaggccaaggccaggaagaaccaaatgccccnggatcttaagagaaccagaagtgatttactattaagggagcacaggggtgtgaggcggagggtgggaggggtcatggatccggaggaaccaatggggtagggcaggttgagggcctgtgtgtgcccaaggagagttaggatgctcccttgcagatgacagtgccatggaagtagcgacatctgcatctttgtcttggagtgggggcccaggggactgtggacagagggaggttagagagatgacaacagtggataggtgctactgaaggcatcttgggaaaatagcgggtaaccagaaagggagtggtgcaggaatggcgaggcggaggt

SEQ ID NO: 3861 - DNA, 661 bp, Homo sapiens
  misc_feature [331]..[331]: Chromosome 9, SNP identification no. = rs1556144
  misc_feature [331]..[331]: allele = t, in linkage disequilibrium with rs4836648, respectively
  misc_feature [331]..[331]: n is a, t, c or g
aagatcaagataacttcctggcccagcctcagggccctcatctctaaaatggggatgctgataaagttggtacctcttaaggctgttgtgggaattgattgataatgttctcataaagcacttagcctatgcctggcacgggacgacctttggggccagccaccattggtgttgctgtcattattattccaccccaagaaccagaaatagagccaaggtcctcgtgcttttccatccaactttatactttacttccccaagcagcccagctggtcttctcaccaccaccaccccccgaccaagtccttgagtttagttcaatctgagttcnttgagcacctactatgtgaccaatctcatgctgggcactatgaccaaagaggcaagcaaggcacagtgcccaccccagagggctctcagtgacatgaggaggcagcctcaagttcagatctctttgggccaatccagtcagtgaaaagcacatttctgttccaagggagggcaatgaaagggtctggggggtcagggaggcttcctgggggaggcgaataaaggtgggcaggacagttcagagaatgggagccacacaggccaaggccaggaagaaccaaatgccccaggatcttaagagaaccagaagtgatttactattaagggagca

SEQ ID NO: 3862 - DNA, 661 bp, Homo sapiens
  misc_feature [331]..[331]: Chromosome 9, SNP identification no. = rs1556143
  misc_feature [331]..[331]: allele = c, in linkage disequilibrium with rs4836648, respectively
  misc_feature [331]..[331]: n is a, t, c or g
acccctccaatcagggacagccaagatcaagataacttcctggcccagcctcagggccctcatctctaaaatggggatgctgataaagttggtacctcttaaggctgttgtgggaattgattgataatgttctcataaagcacttagcctatgcctggcacgggacgacctttggggccagccaccattggtgttgctgtcattattattccaccccaagaaccagaaatagagccaaggtcctcgtgcttttccatccaactttatactttacttccccaagcagcccagctggtcttctcaccaccaccaccccccgaccaagtccttnagtttagttcaatctgagttcattgagcacctactatgtgaccaatctcatgctgggcactatgaccaaagaggcaagcaaggcacagtgcccaccccagagggctctcagtgacatgaggaggcagcctcaagttcagatctctttgggccaatccagtcagtgaaaagcacatttctgttccaagggagggcaatgaaagggtctggggggtcagggaggcttcctgggggaggcgaataaaggtgggcaggacagttcagagaatgggagccacacaggccaaggccaggaagaaccaaatgccccaggatcttaagagaaccagaa

SEQ ID NO: 3863 - DNA, 661 bp, Homo sapiens
  misc_feature [331]..[331]: Chromosome 9, SNP identification no. = rs10819481
  misc_feature [331]..[331]: allele = c, in linkage disequilibrium with rs4836648, respectively
  misc_feature [331]..[331]: n is a, t, c or g
caggacagagcaggactggagctcctcctccaggggagttgggatctggtgcaagacagggttgcctgggggcctgagtgtcgatgtctggaagcaggaaggtggctgagggacaggcccaggcacccaggggtagaagccaaggtgaccgtccctgggttttatccttcttgtctctgtccctctgaaataaaaagcagggtcgccaggtgagagagagtcggagagatggtgtgggtgggcgagggacgaggaggagggctggacttgtgacccagcagggggcaagtggatgggcagggaaggagatttaaccgatggaaatcatgcnggctgtgcacctgctctgtgccaggagtcatgccaatagcacttccacgttttctcatttaattctcccagctctctatgtggtgtctgtcatttttattttccattttacagaggtggagactttaagtctgaggaaggtgccatggtctgaatgtgtgtgcccctcagatacatgagttgaaacctaacccctaaggtggtggcatgaggaggtggggcctttgggggtgacctggtcatgatggtggagcccttaggaatgggattcatgcccttatagaagaggccccagagagctgtcttgtcccttccacgtgaggatgcagag

SEQ ID NO: 3864 - DNA, 661 bp, Homo sapiens
  misc_feature [331]..[331]: Chromosome 9, SNP identification no. = rs10119824
  misc_feature [331]..[331]: allele = a, in linkage disequilibrium with rs4836648, respectively
  misc_feature [331]..[331]: n is a, t, c or g
caggctggagtgcctggcacaatcaccgctcactgtagcctcaaccttcctggctcaagcgatcctcagactcctgagtagctgggaccgcaagtgtgcaccatgacacctggctaatttgattttgattttcatgttttatagagaaacggtcttgccgtgttgcccaggctggtctccaactcctgggctcaagtgatcctcctgaagtgttgggattacaggcatgagccactttgcccggcctaatctctattgtgttttatttttattttaaattttttcccttttactacatatgtaacaaaactgcactaatctctgtattttntaagctacctagtttataaaactaggcagtttatggtatttgtctcagcagtccaaacagactagcatagaaggtgatacaactttccttcgattatataacctgtaagactgaccaccaaacaatcctgtccaaatcccagaagaagcctgaagactattttttcaattataaaattacatttttccctctctgtaaaagtactaaatgtttatttcagaaaattaaaaaattcaaagtaaggtaaatatgaaaaaaaaattaaatgcttatagtttcaccatccaggaataatgactgttaaatggggtgatttccttgcagtaatgt

SEQ ID NO: 3865 - DNA, 661 bp, Homo sapiens
  misc_feature [331]..[331]: Chromosome 9, SNP identification no. = rs7870137
  misc_feature [331]..[331]: allele = g, in linkage disequilibrium with rs4836648, respectively
  misc_feature [331]..[331]: n is a, t, c or g
aacaatcctgtccaaatcccagaagaagcctgaagactattttttcaattataaaattacatttttccctctctgtaaaagtactaaatgtttatttcagaaaattaaaaaattcaaagtaaggtaaatatgaaaaaaaaattaaatgcttatagtttcaccatccaggaataatgactgttaaatggggtgatttccttgcagtaatgttttttatacatattaactggcagacgtgatgctgtgtgttcagcaaatcctgtttcccttctcctctgacatgcagctagactacatttcccagcctcccctgcaaggagagtgtcacatnactgggtctgaccagtggaatgtgggagaaggtaatgtcccttacttatcagcctgttccataaaatcttctattactccttcaagttctctcttctttggatgctctcaggatgggaaggacccagtgaaggacctagtgaaggactccaacaccctagtgagcagccaagctgctagatggaagaaaccagggttcccaaatgacccagtagagtcaagactcttcccaacccctgctgcccaacatttgacagtgtcttggggagaaatgaaccttagttgtgttaagccattgaactctgggagttgttggttaaagcagttagcc

SEQ ID NO: 3866 - DNA, 661 bp, Homo sapiens
  misc_feature [331]..[331]: Chromosome 9, SNP identification no. = rs10819483
  misc_feature [331]..[331]: allele = t, in linkage disequilibrium with rs4836648, respectively
  misc_feature [331]..[331]: n is a, t, c or g
cagataccctttttggcaggccaggggcagtggcccatgcttgtaattccagcatttgaggctaggagttcgaggccagtttggccaacatggcaaaaccccatctctactaaaaatacaaaaattagccaggcgtgatggcacatgcctgtaattccagctactcgggaggctgaggcatgagatcacttgaatccgggaggtggaggttgcagtaagctgagatcatatcaccgtactccagcctgggtgacaaaatgaaactctgcctcaaaaaaaaaagatacccttttaggctgatttattattattgttactattacttaacatntatcacaacctttcaccatattattaaatcactttttttttgagacagagtcttgctccattgctcaggctgaagtgcagtggtgcaatctcggctcactgcaacctccacctccctggctcaggtgatcctcccacctccacctaccaagtagctgggactacaggcgcctgccaccatgcccaactaatttttgtatttatttatttatttttgagatggagtttcgctctcgttgcccaggctgcagtgcaaatggcgcgatcttggctcactgcaatctccgcctcccaggttcaagtgattctcctgcctcagcctcccgagtag

SEQ ID NO: 3867 - DNA, 661 bp, Homo sapiens
  misc_feature [331]..[331]: Chromosome 9, SNP identification no. = rs10988289
  misc_feature [331]..[331]: allele = a, in linkage disequilibrium with rs4836648, respectively
  misc_feature [331]..[331]: n is a, t, c or g
tggcgcgatcttggctcactgcaatctccgcctcccaggttcaagtgattctcctgcctcagcctcccgagtagctgggattacaggcatgcgccaccacgcctggctaattttgtatttttagtagagacagggtttctccatgttggtcaggttggtctcaaatttccaacatcaggtgatccgcccacctcggcctcccaaattgctgggattataggcatgagccactgcgcctggcctaatttttgtatttttagtagagatggggtctcaccatgttggccaggctggtcttgaactcttggcctcaagtgttccgactgcctcngcctcccaaattgctgggattagagccatgagccaccatgctgggcccatatcatgaaaccacttttgacagcataattttaatggtggcacagagtccgttatcattatttatttacccagtcccgtgtggatatgtaggttgcttctgacatttgcgtttgtatgtcatgctccagtgaacatcctggtgatcaactgggtggccccatctgcagatgcacttgtgaaacctaccttggtttcctgcctgagcctctcctgtatcggtgcttaaaagggtgccctaactctgcagaaactatcagtagaaatgagtgtagggggccag

SEQ ID NO: 3868 - DNA, 661 bp, Homo sapiens
  misc_feature [331]..[331]: Chromosome 9, SNP identification no. = rs10819484
  misc_feature [331]..[331]: allele = t, in linkage disequilibrium with rs4836648, respectively
  misc_feature [331]..[331]: n is a, t, c or g
attataggcatgagccactgcgcctggcctaatttttgtatttttagtagagatggggtctcaccatgttggccaggctggtcttgaactcttggcctcaagtgttccgactgcctcagcctcccaaattgctgggattagagccatgagccaccatgctgggcccatatcatgaaaccacttttgacagcataattttaatggtggcacagagtccgttatcattatttatttacccagtcccgtgtggatatgtaggttgcttctgacatttgcgtttgtatgtcatgctccagtgaacatcctggtgatcaactgggtggccccatcngcagatgcacttgtgaaacctaccttggtttcctgcctgagcctctcctgtatcggtgcttaaaagggtgccctaactctgcagaaactatcagtagaaatgagtgtagggggccaggcgcgatggctcacgcctgcaatctcagcactttgggaagccaaggttggtggatcacttgaggtcaggagttcgagaccagcctggccaatatggtgaaaccccgcctcgaataaaaatacaaaaattagctgggcttgatggcgcgagcctgtaatcccagctgcttgggaggctgaggcaggagaatcacctgaacctgggaggcagagg

SEQ ID NO: 3869 - DNA, 661 bp, Homo sapiens
  misc_feature [331]..[331]: Chromosome 9, SNP identification no. = rs10760602
  misc_feature [331]..[331]: allele = t, in linkage disequilibrium with rs4836648, respectively
  misc_feature [331]..[331]: n is a, t, c or g
gtcttgaactcttggcctcaagtgttccgactgcctcagcctcccaaattgctgggattagagccatgagccaccatgctgggcccatatcatgaaaccacttttgacagcataattttaatggtggcacagagtccgttatcattatttatttacccagtcccgtgtggatatgtaggttgcttctgacatttgcgtttgtatgtcatgctccagtgaacatcctggtgatcaactgggtggccccatctgcagatgcacttgtgaaacctaccttggtttcctgcctgagcctctcctgtatcggtgcttaaaagggtgccctaactcngcagaaactatcagtagaaatgagtgtagggggccaggcgcgatggctcacgcctgcaatctcagcactttgggaagccaaggttggtggatcacttgaggtcaggagttcgagaccagcctggccaatatggtgaaaccccgcctcgaataaaaatacaaaaattagctgggcttgatggcgcgagcctgtaatcccagctgcttgggaggctgaggcaggagaatcacctgaacctgggaggcagaggttgcaatgagctgagattgcaccattgtactccagcctgggtaacagagtgagactctgtgtcaaaacaaaaaaacagaa

SEQ ID NO: 3870 - DNA, 661 bp, Homo sapiens
  misc_feature [331]..[331]: Chromosome 9, SNP identification no. = rs913773
  misc_feature [331]..[331]: allele = c, in linkage disequilibrium with rs4836648, respectively
  misc_feature [331]..[331]: n is a, t, c or g
cctttcctgctgatgtcttggcagtggggagaggaggggtgacaaaaccgaaagtctctctttttttttttttgtaaagtcgtctcttacaggaaaatatgtggtcctttcaaagccctatcccttgtaagggtggtttctctgcactcgggggggtctccctcctgtttccttttgaagatggtgtctggctgtgtggagaagcttgcatgggccaggacaggagtctcttgccctacttgccatcactggacctgctcaggaggggcgggtctggtctgccctggtctccgggaaccgcatccacgttctctgaggctgactggacttngctttgccctgaaaacttccaattcacagtcaatcttcttcccatatgttgtttttttctgtggctgctctaataaagtcccacaaacccggtggttgaaaaccacagaaatgtgttctctcacagtcccagaggccagaagtctgaaatcaatgtgtgggcagtgccgtgcctcctctgaaacctctaggggaaggtcctttcttgcctttccggctttagccccagacttacaaatgcatctctccactctctgcctccaatgtcacatggcattttcctcttcttctaagaacaccactcatattggattaggccccacctaatgac

SEQ ID NO: 3871 - DNA, 661 bp, Homo sapiens
  misc_feature [331]..[331]: Chromosome 9, SNP identification no. = rs913774
  misc_feature [331]..[331]: allele = t, in linkage disequilibrium with rs4836648, respectively
  misc_feature [331]..[331]: n is a, t, c or g
tggctgtgtggagaagcttgcatgggccaggacaggagtctcttgccctacttgccatcactggacctgctcaggaggggcgggtctggtctgccctggtctccgggaaccgcatccacgttctctgaggctgactggacttcgctttgccctgaaaacttccaattcacagtcaatcttcttcccatatgttgtttttttctgtggctgctctaataaagtcccacaaacccggtggttgaaaaccacagaaatgtgttctctcacagtcccagaggccagaagtctgaaatcaatgtgtgggcagtgccgtgcctcctctgaaacctcnaggggaaggtcctttcttgcctttccggctttagccccagacttacaaatgcatctctccactctctgcctccaatgtcacatggcattttcctcttcttctaagaacaccactcatattggattaggccccacctaatgacctcttcttaattatatctgcaaggacctttatttccaaataaggtcacattcacaggtactgggggttagggccgcagcatatcttttttggggacacacttcaacccataagaccatcccattcagttcctgggcttcctccactcagctgcaggggttgggggtctctgtgagactgtcctcagcc

SEQ ID NO: 3872 - DNA, 661 bp, Homo sapiens
  misc_feature [331]..[331]: Chromosome 9, SNP identification no. = rs17460119
  misc_feature [331]..[331]: allele = a, in linkage disequilibrium with rs4836648, respectively
  misc_feature [331]..[331]: n is a, t, c or g
cttgccatcactggacctgctcaggaggggcgggtctggtctgccctggtctccgggaaccgcatccacgttctctgaggctgactggacttcgctttgccctgaaaacttccaattcacagtcaatcttcttcccatatgttgtttttttctgtggctgctctaataaagtcccacaaacccggtggttgaaaaccacagaaatgtgttctctcacagtcccagaggccagaagtctgaaatcaatgtgtgggcagtgccgtgcctcctctgaaacctctaggggaaggtcctttcttgcctttccggctttagccccagacttacaaangcatctctccactctctgcctccaatgtcacatggcattttcctcttcttctaagaacaccactcatattggattaggccccacctaatgacctcttcttaattatatctgcaaggacctttatttccaaataaggtcacattcacaggtactgggggttagggccgcagcatatcttttttggggacacacttcaacccataagaccatcccattcagttcctgggcttcctccactcagctgcaggggttgggggtctctgtgagactgtcctcagcccctctgcctggggactggggaccctcagtcatttccatctgctgcagcct

SEQ ID NO: 3873 - DNA, 661 bp, Homo sapiens
  misc_feature [331]..[331]: Chromosome 9, SNP identification no. = rs883343
  misc_feature [331]..[331]: allele = t, in linkage disequilibrium with rs4836648, respectively
  misc_feature [331]..[331]: n is a, t, c or g
ggcctgacattgcacccagtgtggccaggctgcagcagatggaaatgactgagggtccccagtccccaggcagaggggctgaggacagtctcacagagacccccaacccctgcagctgagtggaggaagcccaggaactgaatgggatggtcttatgggttgaagtgtgtccccaaaaaagatatgctgcggccctaacccccagtacctgtgaatgtgaccttatttggaaataaaggtccttgcagatataattaagaagaggtcattaggtggggcctaatccaatatgagtggtgttcttagaagaagaggaaaatgccatgtgacnttggaggcagagagtggagagatgcatttgtaagtctggggctaaagccggaaaggcaagaaaggaccttcccctagaggtttcagaggaggcacggcactgcccacacattgatttcagacttctggcctctgggactgtgagagaacacatttctgtggttttcaaccaccgggtttgtgggactttattagagcagccacagaaaaaaacaacatatgggaagaagattgactgtgaattggaagttttcagggcaaagcgaagtccagtcagcctcagagaacgtggatgcggttcccggagaccagggcagaccagacccgcccc

SEQ ID NO: 3874 - DNA, 661 bp, Homo sapiens
  misc_feature [331]..[331]: Chromosome 9, SNP identification no. = rs883342
  misc_feature [331]..[331]: allele = a, in linkage disequilibrium with rs4836648, respectively
  misc_feature [331]..[331]: n is a, t, c or g
catcctaaggggtctgcgaggctcaccttaggcctgacattgcacccagtgtggccaggctgcagcagatggaaatgactgagggtccccagtccccaggcagaggggctgaggacagtctcacagagacccccaacccctgcagctgagtggaggaagcccaggaactgaatgggatggtcttatgggttgaagtgtgtccccaaaaaagatatgctgcggccctaacccccagtacctgtgaatgtgaccttatttggaaataaaggtccttgcagatataattaagaagaggtcattaggtggggcctaatccaatatgagtggtgtncttagaagaagaggaaaatgccatgtgacattggaggcagagagtggagagatgcatttgtaagtctggggctaaagccggaaaggcaagaaaggaccttcccctagaggtttcagaggaggcacggcactgcccacacattgatttcagacttctggcctctgggactgtgagagaacacatttctgtggttttcaaccaccgggtttgtgggactttattagagcagccacagaaaaaaacaacatatgggaagaagattgactgtgaattggaagttttcagggcaaagcgaagtccagtcagcctcagagaacgtggatgcggttc

SEQ ID NO: 3875 - DNA, 661 bp, Homo sapiens
  misc_feature [331]..[331]: Chromosome 9, SNP identification no. = rs10988290
  misc_feature [331]..[331]: allele = c, in linkage disequilibrium with rs4836648, respectively
  misc_feature [331]..[331]: n is a, t, c or g
cttcacctctgctgttcctactactggcacttgtagtgaggtagggtgggactggactctggaggcagaccttggacactggaccaaattgaccttggacactggactagctaaagcaagcctggggtggaagcacctcttcataaggctgcccaccagtgtgccatgccagtttaccattggcatggcaacacccagaagtgactgccctttccatggcaacagcccaatgatctggaagttaccacccttttcctagaaatttctacatgaactgtcccttaatttgcatataattaaaagtgggtatcactatgagtgcagaattggntctgagctgccactctgggcacacagcctgcgggggagccctgctctgcagggagcagttcctccgctgggctaggcatggccactttaatacaagctgttgtctaacaccaccagctcacccttacatactttcctgggtgaagccaagaaccctcctgggttaagccccagttttggggctcatctgccccgcatcagtaggaacccaccaagtgtgggaagagggaatggaagccagcggaagtgatgccatcattttgtatgatgtttactccgtgaaagtgccgacatgcagctgttgtcaacctacaaacatggcaactgctta

SEQ ID NO: 3876 - DNA, 661 bp, Homo sapiens
  misc_feature [331]..[331]: Chromosome 9, SNP identification no. = rs7865327
  misc_feature [331]..[331]: allele = t, in linkage disequilibrium with rs4836648, respectively
  misc_feature [331]..[331]: n is a, t, c or g
tgaaagcagggtctcaaagagagatctgtgcacccatcgtcatagcagcattattcgcaatagccaaaaggtggaagcatcgatgggcgaatggatacgcaaaatgtggtgtagacacgcaagggactcggattcagccttaaagaggaaggaggttctgacacacattgcagtgtggatgaaccttgaggatattatgctagtgaaataagccagccccaaaaagttaaatgctgtatgattccacttacacaaaatacttagagtcgtcataatcatagagacagagagtgttgccaggggctggagggagcgggtaacgggaatgagngtttactggggacagaatctcatactataaagatgaaaactttctagagatgaaggtggtgatgcttgcacaaccacgtgcgtgtacgatgccactggactgaacatgtaaaatgcttgcaatggtaaactatgtgttatgtgtattttacaagcaaaaaaagaaaactttggtaattgcctgtgccagaagccaccatgccctggcttagcgggacagaggagccagcccctgggaacagactcctacccttgagaaaaggctaagaccactgtggtgggctctccccaggctccccttgctctagcctggccttgcctctcggttccc

SEQ ID NO: 3877 - DNA, 661 bp, Homo sapiens
  misc_feature [331]..[331]: Chromosome 9, SNP identification no. = rs7865568
  misc_feature [331]..[331]: allele = t, in linkage disequilibrium with rs4836648, respectively
  misc_feature [331]..[331]: n is a, t, c or g
ttctgacacacattgcagtgtggatgaaccttgaggatattatgctagtgaaataagccagccccaaaaagttaaatgctgtatgattccacttacacaaaatacttagagtcgtcataatcatagagacagagagtgttgccaggggctggagggagcgggtaacgggaatgagcgtttactggggacagaatctcatactataaagatgaaaactttctagagatgaaggtggtgatgcttgcacaaccacgtgcgtgtacgatgccactggactgaacatgtaaaatgcttgcaatggtaaactatgtgttatgtgtattttacaagnaaaaaaagaaaactttggtaattgcctgtgccagaagccaccatgccctggcttagcgggacagaggagccagcccctgggaacagactcctacccttgagaaaaggctaagaccactgtggtgggctctccccaggctccccttgctctagcctggccttgcctctcggttccctgaatcaatcaatctttctttctttctttttctttctttccttctttctctctcgctctttctttccttccttcctttctctttctttccttccttccttcctttatctttctttcttcctttcctttctttctttccttctctctctctttctt

SEQ ID NO: 3878 - DNA, 661 bp, Homo sapiens
  misc_feature [331]..[331]: Chromosome 9, SNP identification no. = rs10988292
  misc_feature [331]..[331]: allele = g, in linkage disequilibrium with rs4836648, respectively
  misc_feature [331]..[331]: n is a, t, c or g
ataatcatagagacagagagtgttgccaggggctggagggagcgggtaacgggaatgagcgtttactggggacagaatctcatactataaagatgaaaactttctagagatgaaggtggtgatgcttgcacaaccacgtgcgtgtacgatgccactggactgaacatgtaaaatgcttgcaatggtaaactatgtgttatgtgtattttacaagcaaaaaaagaaaactttggtaattgcctgtgccagaagccaccatgccctggcttagcgggacagaggagccagcccctgggaacagactcctacccttgagaaaaggctaagaccnctgtggtgggctctccccaggctccccttgctctagcctggccttgcctctcggttccctgaatcaatcaatctttctttctttctttttctttctttccttctttctctctcgctctttctttccttccttcctttctctttctttccttccttccttcctttatctttctttcttcctttcctttctttctttccttctctctctctttctttccttccttcctttctctttctttctttctctttctttctttccttccttccttcttctttctttctttctttctttctttctttctttctttctttctttcggtctcgctctgtc

SEQ ID NO: 3879 - DNA, 661 bp, Homo sapiens
  misc_feature [331]..[331]: Chromosome 9, SNP identification no. = rs17517009
  misc_feature [331]..[331]: allele = g, in linkage disequilibrium with rs4836648, respectively
  misc_feature [331]..[331]: n is a, t, c or g
ccgcctgaagcatcccatcttggagcactgcctcttgtctttccacacattccctctgcaaccttaactctgatctttctttgcctcttgccatctgcccccagggcacattccttttccttcacctcccgtgtcctctgcttccttgggttccaggctcattgtctgctgcagacgccctcagtcaccctgccctccccctcctccatccacctggcagaacccctgtcccggttgagttctgggtgctgctcagtgtgctctgacatccaagcagcggagccctggacaaagccacctgatggcacaaacagctttatatctcatgacnttgacctccaacaaacatttgtgctgtccagcaatcctctgtgttcctcggtcagcttgcagcccccgtctcccagaccacaacttctctctctccccaaacctccaataccccaccctccctcagccctcattctcactgtcggatgataggttgcttttttttttttttgaggcaggatcttgctatgttgctgaggctggagtacagtggtgtgatcacgattcactgcagcctcaaacttctgggctaaagtgatcctccctcctcatccttcttgagtagctggggctacaggtacacatcaccacgcctggctagctttttttt

SEQ ID NO: 3880 - DNA, 661 bp, Homo sapiens
  misc_feature [331]..[331]: Chromosome 9, SNP identification no. = rs10819485
  misc_feature [331]..[331]: allele = g, in linkage disequilibrium with rs4836648, respectively
  misc_feature [331]..[331]: n is a, t, c or g
tgccttggaacccagcccagcccagcctccgcgcttccctgcctgcctgggcctgcacctggccaacccccgcaacaacctccaccaggtgtgcagccttgaaaactgttggttctggttgccaactctcctagcagagaggggtgctccagggaccaagggtctgtggtacctgagcaaatctcttctagctgccctgaccaccctcctgtgggtccctctcctccatttcccccacctggtgggtggggctgagggagcagagaccacgcccccaatccagccacactcttcttccagccaaccaagcaccagaaaaccaagatttgcncaaagagctggtggcctgggagcaggtccctcaggctcctcacatctgccctgcagaaggggcagacattgtctcattctgggagtcactcatggtaccgagatcaaacccccaggtaacccccacacagccttgcacaagccttgcttctcactttggacatctacattgcaccacttggggtcgtcatttgtagccagcgaggtgacctgggtgggggcagagctggatctagaaccccccccccggtccctcccctgggcaagggccccacatttccttttccagtgatgctcccatgcccagaatctttctggactccagctgcag

SEQ ID NO: 3881 - DNA, 661 bp, Homo sapiens
  misc_feature [331]..[331]: Chromosome 9, SNP identification no. = rs12552872
  misc_feature [331]..[331]: allele = c, in linkage disequilibrium with rs4836648, respectively
  misc_feature [331]..[331]: n is a, t, c or g
aacccccaggtaacccccacacagccttgcacaagccttgcttctcactttggacatctacattgcaccacttggggtcgtcatttgtagccagcgaggtgacctgggtgggggcagagctggatctagaaccccccccccggtccctcccctgggcaagggccccacatttccttttccagtgatgctcccatgcccagaatctttctggactccagctgcagaatggccattcatctcgggtttcaatttcccacctgcccctttgacctccccaggcggggagcgggggccttggctgggcttgtcgctggggcttgggggcaactcncccagtgagaacctgctacgtgccaggtgcgcctctcacccagtcctcacagcagccctgcatcttcacaaatgagaaaacaggccgggcgcggtggctcatgcctgtaatcccagcactttgggaggccaaggtgggtggatcacctgaggtcaggagttccagaccagcctggccaacatagtgaaaccccgtctctactaaaaatacaaaaattagccgggtgtgatggcgggcgcctgtaatcccagctactcaggaggctgaggcaggagaatcacttgaacccgggaggcagaggttgcagtgagccgagatcgtgccactgca

SEQ ID NO: 3882 - DNA, 661 bp, Homo sapiens
  misc_feature [331]..[331]: Chromosome 9, SNP identification no. = rs10988297
  misc_feature [331]..[331]: allele = g, in linkage disequilibrium with rs4836648, respectively
  misc_feature [331]..[331]: n is a, t, c or g
acagcagccctgcatcttcacaaatgagaaaacaggccgggcgcggtggctcatgcctgtaatcccagcactttgggaggccaaggtgggtggatcacctgaggtcaggagttccagaccagcctggccaacatagtgaaaccccgtctctactaaaaatacaaaaattagccgggtgtgatggcgggcgcctgtaatcccagctactcaggaggctgaggcaggagaatcacttgaacccgggaggcagaggttgcagtgagccgagatcgtgccactgcactccagcctgggcgacaaagggagactctgtgttaaaaaataaataaanaaaagaaaagaaaacaaagaagaaaggtccctggttagggccacggggggatgcagcagggcccatggcctgggagggggtggtggctgggcggtgccaggatggagagatacatctgtcttataagagtgggcagacaggcccttgttccaggagctgaaatgaaacagaactgtgtatatatcttctcatctatagactaaattaaactaactcatagaaatagtctgttttaagtttctttacttaaaagtatcttacacgtttaacacctgccaatacacgtatgtacgtgatattcagtaatgatcattgcaaactgggcacggt

SEQ ID NO: 3883 - DNA, 661 bp, Homo sapiens
  misc_feature [331]..[331]: Chromosome 9, SNP identification no. = rs10988298
  misc_feature [331]..[331]: allele = g, in linkage disequilibrium with rs4836648, respectively
  misc_feature [331]..[331]: n is a, t, c or g
tctcatctatagactaaattaaactaactcatagaaatagtctgttttaagtttctttacttaaaagtatcttacacgtttaacacctgccaatacacgtatgtacgtgatattcagtaatgatcattgcaaactgggcacggtggctcatgcctgtaatcccgacactttgggaggctgagatgggaggatcacttgaacccaggaggttgaggctgcagtgagctgtgatggtgccactgccctccagcttgggtgacagagcaagatcctgtctgtaaataataataataatagtaataactgcgaccacctatacaaatttcatctntacatcccaggtattgtgcaccctccatacaaatgtatgaaaattcacagaaagcctgtgcttggtcagtgctatcatcaggcctatttggcagatgcagaaacaggctcacagaagggaagtcacttgctgaaagccacatggctggcacggggtggcactgagacttgcacccagatctgggcagcattaaaacccctgccccacccgtggtcctctcctgtctccgtgttagcgtggagccctgagatgttttaggagccggctttccgatttccatctgtgtttgtggtgattgccctgatctttcaggcattctgccctagaaag

SEQ ID NO: 3884 - DNA, 661 bp, Homo sapiens
  misc_feature [331]..[331]: Chromosome 9, SNP identification no. = rs10819487
  misc_feature [331]..[331]: allele = c, in linkage disequilibrium with rs4836648, respectively
  misc_feature [331]..[331]: n is a, t, c or g
tcacagaaagcctgtgcttggtcagtgctatcatcaggcctatttggcagatgcagaaacaggctcacagaagggaagtcacttgctgaaagccacatggctggcacggggtggcactgagacttgcacccagatctgggcagcattaaaacccctgccccacccgtggtcctctcctgtctccgtgttagcgtggagccctgagatgttttaggagccggctttccgatttccatctgtgtttgtggtgattgccctgatctttcaggcattctgccctagaaagccccttggggagggggcttcctgtttcacctgcttggacgtggcnttggagctaagaccgagaggagtcaaggtgggattcctcggatgccctgagggagtgcgatgggatgcctgggggctgctcctccagcctcagacactcctgcccacagcccctggccaggccctgcctgagccactgctctaggctgcaaagggctggctctcatttcctaattcatcctgccagctggagccaaggtggactctccccatagactgggatgagtgccctggcccagctggacctggtggtggctatgagcccccttgtgtcaccttttccctacccagggctcatcacaagctgcagggggatgctcttgggtctcag

SEQ ID NO: 3885 - DNA, 661 bp, Homo sapiens
  misc_feature [331]..[331]: Chromosome 9, SNP identification no. = rs7041313
  misc_feature [331]..[331]: allele = t, in linkage disequilibrium with rs4836648, respectively
  misc_feature [331]..[331]: n is a, t, c or g
gaaagccccttggggagggggcttcctgtttcacctgcttggacgtggctttggagctaagaccgagaggagtcaaggtgggattcctcggatgccctgagggagtgcgatgggatgcctgggggctgctcctccagcctcagacactcctgcccacagcccctggccaggccctgcctgagccactgctctaggctgcaaagggctggctctcatttcctaattcatcctgccagctggagccaaggtggactctccccatagactgggatgagtgccctggcccagctggacctggtggtggctatgagcccccttgtgtcaccttttncctacccagggctcatcacaagctgcagggggatgctcttgggtctcagggagagtggcctgagtcccccggggcttctgagtgcatccaggctgctctgctgaccctggaaggcaaccagggaagctgtgaggtcagggtaagggatgggcctcaagagcgggtcatggcccagctggggcctgtgtggacagaggcctcactgtctccactgcatgcagggagtcttgaggccaagtgacacatttgccacctgtgacatacgccaccagcccgtgtgtctgtgccccagatacagccagccagtgcagagtgaggcctgccagggcc

SEQ ID NO: 3886 - DNA, 661 bp, Homo sapiens
  misc_feature [331]..[331]: Chromosome 9, SNP identification no. = rs7041309
  misc_feature [331]..[331]: allele = g, in linkage disequilibrium with rs4836648, respectively
  misc_feature [331]..[331]: n is a, t, c or g
cctgcttggacgtggctttggagctaagaccgagaggagtcaaggtgggattcctcggatgccctgagggagtgcgatgggatgcctgggggctgctcctccagcctcagacactcctgcccacagcccctggccaggccctgcctgagccactgctctaggctgcaaagggctggctctcatttcctaattcatcctgccagctggagccaaggtggactctccccatagactgggatgagtgccctggcccagctggacctggtggtggctatgagcccccttgtgtcaccttttccctacccagggctcatcacaagctgcagggggntgctcttgggtctcagggagagtggcctgagtcccccggggcttctgagtgcatccaggctgctctgctgaccctggaaggcaaccagggaagctgtgaggtcagggtaagggatgggcctcaagagcgggtcatggcccagctggggcctgtgtggacagaggcctcactgtctccactgcatgcagggagtcttgaggccaagtgacacatttgccacctgtgacatacgccaccagcccgtgtgtctgtgccccagatacagccagccagtgcagagtgaggcctgccagggccctgtgttgtggggatgtgacagagctgccagtc

SEQ ID NO: 3887 - DNA, 661 bp, Homo sapiens
  misc_feature [331]..[331]: Chromosome 9, SNP identification no. = rs913768
  misc_feature [331]..[331]: allele = t, in linkage disequilibrium with rs4836648, respectively
  misc_feature [331]..[331]: n is a, t, c or g
ccagagggcttctgcaacctcttctggaaaaaggaccagggaggtacctgtttcatgcccaggaggtcatgatagtgcctatcagcgttaaatgccatctggtccttgcctcgcaaggagccctgtcccctggttcactggcttaggggtgcccctcaggtcagtgtttccccagtgtggggtgggcaccctcggtgacctaggagacagtgacgtcagggatcacacagcctcataccacacaaaggtgattcccttctctgtctcagccctctggtcccctggaggggaagcttgcaactccccaacgcttttctatcaaaatgccatnggcaggcaacaatagccagctagaatttcctaacattgcttattttaattgtaatttatttttacttttaccttctatttatggcccatgatcttagttttttttccacctaacagtagtcacataaagttcccttatggatgcatttacctaagtaatagcagtgaatgcttttaaagaaaaatagagagcaaataacagaataaggtgccactggaagggccgggtcaagaggagggggtggacggacctgtgggtggcactggcttttcgtaactcaggaatcaggaagtgtagttgacacttgttttgttatgtttgctccaatgg

SEQ ID NO: 3888 - DNA, 661 bp, Homo sapiens
  misc_feature [331]..[331]: Chromosome 9, SNP identification no. = rs913769
  misc_feature [331]..[331]: allele = a, in linkage disequilibrium with rs4836648, respectively
  misc_feature [331]..[331]: n is a, t, c or g
gtcagggatcacacagcctcataccacacaaaggtgattcccttctctgtctcagccctctggtcccctggaggggaagcttgcaactccccaacgcttttctatcaaaatgccatcggcaggcaacaatagccagctagaatttcctaacattgcttattttaattgtaatttatttttacttttaccttctatttatggcccatgatcttagttttttttccacctaacagtagtcacataaagttcccttatggatgcatttacctaagtaatagcagtgaatgcttttaaagaaaaatagagagcaaataacagaataaggtgccantggaagggccgggtcaagaggagggggtggacggacctgtgggtggcactggcttttcgtaactcaggaatcaggaagtgtagttgacacttgttttgttatgtttgctccaatggaaaaggaagctgtgggtggagacacatctgacgggagggatttggatcctgccagctcgtccctgcaaccccctactccggtcccctcaaacctgtccgtggctggcagccctgtgatacctcgccacattctgcaacagaatccgagatagaggtagaagtgggggagtacgtcgtggctgtcagggcagctttctgtaaaatgctgcctgga

SEQ ID NO: 3889 - DNA, 661 bp, Homo sapiens
  misc_feature [331]..[331]: Chromosome 9, SNP identification no. = rs11794563
  misc_feature [331]..[331]: allele = t, in linkage disequilibrium with rs4836648, respectively
  misc_feature [331]..[331]: n is a, t, c or g
ggggtggacggacctgtgggtggcactggcttttcgtaactcaggaatcaggaagtgtagttgacacttgttttgttatgtttgctccaatggaaaaggaagctgtgggtggagacacatctgacgggagggatttggatcctgccagctcgtccctgcaaccccctactccggtcccctcaaacctgtccgtggctggcagccctgtgatacctcgccacattctgcaacagaatccgagatagaggtagaagtgggggagtacgtcgtggctgtcagggcagctttctgtaaaatgctgcctggaggagcatgtgattccagaccctcntctctgcaacgaaagtgaggttgacacctgcaggtatgattgtaacacgacttttagttcaggtgagcgcagccttcctctcctggagctctggctcatccagccctgagctccccagtccaaggctctccgggtaccttgggcagcctccctagcagggcggtgggatcggaccagctgttcccggctgctggtccgttccaagctgcaagggcctaggtgcggagcaatgaccggcaggccgagctccctccctccctctcgttgcaggcctggggcctcctggcccactgagcagaacacacagaagctgggcccacccctgccctc

SEQ ID NO: 3890 - DNA, 661 bp, Homo sapiens
  misc_feature [331]..[331]: Chromosome 9, SNP identification no. = rs3824537
  misc_feature [331]..[331]: allele = g, in linkage disequilibrium with rs4836648, respectively
  misc_feature [331]..[331]: n is a, t, c or g
ggaaaagggaagtcagacaagattccccagtgccagtgacgggcaccactgcctccccagagccaccacaagccagccgccccttggcagcaggggtctgggagcccttggcagttcaaccctgtacggacaccgtttgaggggctagaaataagccaggatgaaatgttatgaaataataataatagtcccttctctggcccactgcagaaccctagaaagtaagggactggggccaacggcagctgcagtcaaggtgcctgcagctatgtgaccccagggcctagcccgcccctgcctcccgcccttcacttaattccaaatacctttnctcttgtcagccgcaagtcagtgggcttcaaagtcaggcggtggctcccgtgaccctttgtggggagggcaggggtgggcccagcttctgtgtgttctgctcagtgggccaggaggccccaggcctgcaacgagagggagggagggagctcggcctgccggtcattgctccgcacctaggcccttgcagcttggaacggaccagcagccgggaacagctggtccgatcccaccgccctgctagggaggctgcccaaggtacccggagagccttggactggggagctcagggctggatgagccagagctccaggagaggaaggctgcgctc

SEQ ID NO: 3891 - DNA, 661 bp, Homo sapiens
  misc_feature [331]..[331]: Chromosome 9, SNP identification no. = rs17517139
  misc_feature [331]..[331]: allele = a, c
  misc_feature [331]..[331]: n is a, t, c or g
cccctgttctgggacttgtgggtgtccccagagcaaattcttggggagccatgcccagccggtctagggggcactcaggggcttgcattttgtcaggctccctcgtggtctggtgtgggtactctggggaccacatttggagaacctgggccccccagttgttaactagcagacgagggcctgtacttaggggccattgtccagcgtttagtgcagagtgactggagaaatgggaggaccagaccctgtgatgggagtgagggtagggggcacaagatgggccgccaccctccaggatctcctggttcacaccagtgcctgcgagaggccnctggggcctcgtgaaagcacaggtggctggttgcatcccaggggttctgattcccaggactggccaggccagagaatctgaatttctgacaagttcctgggcaaggccaatgctgctggccaggaggaccaccctttgagaaccacaggtggacaccagcagccgcagacccggctaggaccagggcagaggccacgccctccccattcccccggagctgcctcggcccttggaggaatgagcaggacctaaacaggaaccacgtgatgatattgacgtggcacctgcatgggagcactgctgcctgtccacactgagtgcggcttccaa

SEQ ID NO: 3892 - DNA, 661 bp, Homo sapiens
  misc_feature [331]..[331]: Chromosome 9, SNP identification no. = rs4836647
  misc_feature [331]..[331]: allele = g, in linkage disequilibrium with rs4836648, respectively
  misc_feature [331]..[331]: n is a, t, c or g
ttgttaactagcagacgagggcctgtacttaggggccattgtccagcgtttagtgcagagtgactggagaaatgggaggaccagaccctgtgatgggagtgagggtagggggcacaagatgggccgccaccctccaggatctcctggttcacaccagtgcctgcgagaggcccctggggcctcgtgaaagcacaggtggctggttgcatcccaggggttctgattcccaggactggccaggccagagaatctgaatttctgacaagttcctgggcaaggccaatgctgctggccaggaggaccaccctttgagaaccacaggtggacaccngcagccgcagacccggctaggaccagggcagaggccacgccctccccattcccccggagctgcctcggcccttggaggaatgagcaggacctaaacaggaaccacgtgatgatattgacgtggcacctgcatgggagcactgctgcctgtccacactgagtgcggcttccaagaccacccgcaacacacacagccctgcaaggcgggagctcacgtgcccctcactttacaggcgagaaagctgaggctcagagagggcaagtgacctgcataaggccacacagccagcaagtcagggaacgggtggccaaacccagacctgcccagttt

SEQ ID NO: 3893 - DNA, 661 bp, Homo sapiens
  misc_feature [331]..[331]: Chromosome 9, SNP identification no. = rs17456931
  misc_feature [331]..[331]: allele = g, in linkage disequilibrium with rs4836648, respectively
  misc_feature [331]..[331]: n is a, t, c or g
cctggggcctcgtgaaagcacaggtggctggttgcatcccaggggttctgattcccaggactggccaggccagagaatctgaatttctgacaagttcctgggcaaggccaatgctgctggccaggaggaccaccctttgagaaccacaggtggacaccagcagccgcagacccggctaggaccagggcagaggccacgccctccccattcccccggagctgcctcggcccttggaggaatgagcaggacctaaacaggaaccacgtgatgatattgacgtggcacctgcatgggagcactgctgcctgtccacactgagtgcggcttccangaccacccgcaacacacacagccctgcaaggcgggagctcacgtgcccctcactttacaggcgagaaagctgaggctcagagagggcaagtgacctgcataaggccacacagccagcaagtcagggaacgggtggccaaacccagacctgcccagtttcatgttcgcgccgtgaggggtccagcggctgtggtgtcacttctggttaccccgtcatttagaggggaaagatgtggagaaataggagtgtgtgtggcaggaagggactgggggagagaaaagggcccaggaatcaggcgtgcgtgtggcgttgaaaggagcaacaactcaa

SEQ ID NO: 3894 - DNA, 661 bp, Homo sapiens
  misc_feature [331]..[331]: Chromosome 9, SNP identification no. = rs17456938
  misc_feature [331]..[331]: allele = g, in linkage disequilibrium with rs4836648, respectively
  misc_feature [331]..[331]: n is a, t, c or g
ggccaggaggaccaccctttgagaaccacaggtggacaccagcagccgcagacccggctaggaccagggcagaggccacgccctccccattcccccggagctgcctcggcccttggaggaatgagcaggacctaaacaggaaccacgtgatgatattgacgtggcacctgcatgggagcactgctgcctgtccacactgagtgcggcttccaagaccacccgcaacacacacagccctgcaaggcgggagctcacgtgcccctcactttacaggcgagaaagctgaggctcagagagggcaagtgacctgcataaggccacacagccagcnagtcagggaacgggtggccaaacccagacctgcccagtttcatgttcgcgccgtgaggggtccagcggctgtggtgtcacttctggttaccccgtcatttagaggggaaagatgtggagaaataggagtgtgtgtggcaggaagggactgggggagagaaaagggcccaggaatcaggcgtgcgtgtggcgttgaaaggagcaacaactcaaagtcacgctcaaggtcatgcttaaggtcatgctcaaggtcatgcttaaggtcacgagttcaccccaggaatcccgccctcactggagctgaagcagacccctcccccaggcttcaggg

SEQ ID NO: 3895 - DNA, 661 bp, Homo sapiens
  misc_feature [331]..[331]: Chromosome 9, SNP identification no. = rs17488294
  misc_feature [331]..[331]: allele = a, in linkage disequilibrium with rs4836648, respectively
  misc_feature [331]..[331]: n is a, t, c or g
aacaggaaccacgtgatgatattgacgtggcacctgcatgggagcactgctgcctgtccacactgagtgcggcttccaagaccacccgcaacacacacagccctgcaaggcgggagctcacgtgcccctcactttacaggcgagaaagctgaggctcagagagggcaagtgacctgcataaggccacacagccagcaagtcagggaacgggtggccaaacccagacctgcccagtttcatgttcgcgccgtgaggggtccagcggctgtggtgtcacttctggttaccccgtcatttagaggggaaagatgtggagaaataggagtgtgtntggcaggaagggactgggggagagaaaagggcccaggaatcaggcgtgcgtgtggcgttgaaaggagcaacaactcaaagtcacgctcaaggtcatgcttaaggtcatgctcaaggtcatgcttaaggtcacgagttcaccccaggaatcccgccctcactggagctgaagcagacccctcccccaggcttcaggggtctcctgtggccaggtgatcccctccccgtcagcaccccagggcacacaatgacacctgatattccgctaaacaggacacttcagggtggaggtggggcaggggggtggtgggaggccgcagtactcagcctt

SEQ ID NO: 3896 - DNA, 661 bp, Homo sapiens
  misc_feature [331]..[331]: Chromosome 9, SNP identification no. = rs10819488
  misc_feature [331]..[331]: allele = t, in linkage disequilibrium with rs4836648, respectively
  misc_feature [331]..[331]: n is a, t, c or g
aactcctgacctcaggtgatccgcctgcctcggcctcccaaagtgttgggattacaggcgtgagccaccacgcccatgcccatccccattttatagacaaggataccaaggctcagagaggggaagccacttgccaaggacgcacaggaggacaccagtgagcaggacctctggtctgtctgggaggccactgggcctcttcccagagtctctgcttggtgagccaggattttacacccgccttgggcccagtgggctgagaggacatgggctggggtgtcggaagctgcagagctgatccctcctgcttggctggaggcttgcagacccngcaggcaggctcgggaggcagcgggcgacttgaaaatgcactccctaccacaggctcaagagtgacggcgcctgtcagggaccgggaggcagggcctgtcttttcctgctgttttattgccttcaaagtctggaccaagtggtttctggatggagtcacggtaacctcacgtctattcaagcaattcgttcattgtttcatttagtaaaatacccacaaaacaaggaagaacaccttggcggtgcctctgatccccccatttgtctgcaaatcggaaaagcatgattccatcgatctcctgtttattgagcgcctactacatgctaggtc

SEQ ID NO: 3897 - DNA, 661 bp, Homo sapiens
  misc_feature [331]..[331]: Chromosome 9, SNP identification no. = rs4836648
  misc_feature [331]..[331]: allele = a, g
  misc_feature [331]..[331]: n is a, t, c or g
agcaggacctctggtctgtctgggaggccactgggcctcttcccagagtctctgcttggtgagccaggattttacacccgccttgggcccagtgggctgagaggacatgggctggggtgtcggaagctgcagagctgatccctcctgcttggctggaggcttgcagacccggcaggcaggctcgggaggcagcgggcgacttgaaaatgcactccctaccacaggctcaagagtgacggcgcctgtcagggaccgggaggcagggcctgtcttttcctgctgttttattgccttcaaagtctggaccaagtggtttctggatggagtcacngtaacctcacgtctattcaagcaattcgttcattgtttcatttagtaaaatacccacaaaacaaggaagaacaccttggcggtgcctctgatccccccatttgtctgcaaatcggaaaagcatgattccatcgatctcctgtttattgagcgcctactacatgctaggtcggatggtctagttcaacccctcgcaacgccacagctgctgtctgtttcgtatcttgtatttttcgcttgacagtttatcatgtgcattttctcgggtaccaaaggcccttgtaagagatggtgtctggagaatgggtatctcaggggcctaccacctggc

SEQ ID NO: 3898 - DNA, 661 bp, Homo sapiens
  misc_feature [331]..[331]: Chromosome 9, SNP identification no. = rs4836651
  misc_feature [331]..[331]: allele = c, in linkage disequilibrium with rs4836648, respectively
  misc_feature [331]..[331]: n is a, t, c or g
ctcctcccaaatcagggttcctctgcaccacctcctctctgtccagctcctccttcagggcctggctcaattctacctcctccacaaagccctccattccctcccctcctggtcagtgttgtctcttttgcagccactagctctctgccttgcctcacccgggtctcctatccctctccttctctctcatggagtgatgccttttttcttcctctacacacatcaggtctgagctcaaagtcaccttgtcaaaggccctcccaggaccaccctgtgtgattatcctgtgggcttgttcctgtgtttgtccctgagcccacagggtctggtngttcagtagaaggactcctgcagaaggtgctggataaacactggaagatctagaaataaaaataaaagaaagactgggcgcggtggctcaggcctgtaatcccaacactttgggaggccgaggtgggcggatcccctgaggtcaggagttcgagactaacctggccaacatggcgaaaccccatctctactaaaaatacaaaaattagccaggcatggtggcatgtgcctgtaatcccagctactcaggaggctgaggcaggagaatcgcttgaacccgggaggcagaggttgtagtgagctgagatcgcgccaccgcactctagcctgg

SEQ ID NO: 3899 - DNA, 661 bp, Homo sapiens
  misc_feature [331]..[331]: Chromosome 9, SNP identification no. = rs4366175
  misc_feature [331]..[331]: allele = a, in linkage disequilibrium with rs4836648, respectively
  misc_feature [331]..[331]: n is a, t, c or g
atctctactaaaaatacaaaaattagccaggcatggtggcatgtgcctgtaatcccagctactcaggaggctgaggcaggagaatcgcttgaacccgggaggcagaggttgtagtgagctgagatcgcgccaccgcactctagcctgggcgaaagagtgagactgtatcccaaaaataataaaataaaataaaataaaataaaataaaataaaataaaataaaataaaataaaataaagcacactcagttaaatatgaatgtcagataagtaccaaataacttgtgagtataaatgtatcccaaatatggaatggaatacacatagtaaanatttttttttattatctcaaattcaaatgacactcagcatcttgaatttaatctgacaactccacctcctcctaccctctttgccccttgtcaggcaagctcaatagctaggccgagagctgctgagggcggggaccttgtctgtctaggccactgctgtatgcgtgcctggccctcagcagggaacctgacatgaagcacacgctggataaataaatacctgttgctggagcgagtgatgggttcccagccctcactggggaatcgaggggactccacctcagcccagccagatggaatcgtcgggaacagagtgcaccttaatttctg

SEQ ID NO: 3900 - DNA, 661 bp, Homo sapiens
  misc_feature [331]..[331]: Chromosome 9, SNP identification no. = rs7849421
  misc_feature [331]..[331]: allele = g, in linkage disequilibrium with rs4836648, respectively
  misc_feature [331]..[331]: n is a, t, c or g
aggggactccacctcagcccagccagatggaatcgtcgggaacagagtgcaccttaatttctgcgaagaccaatgcaaattagaagaagactgagatgcaggctgtttgatccaagagatgctttttaattattgtaaaacagctgtgacttactgagcaccaactgtgtacccggcctcacactgttctcatacacaacagctccacggggaaggcattctcaccgagattcagagaggggcagacctggcctcgggtcgcacagctgggaaccggacaccgggctctctccagtcagctcgggtgctgctggccccagcacctcccccntggcgtggaccagggcctccgaggctgctttaaagaaggttctttgagaacggcgcatgtaccgtgtggacactcgtgtgcgcccctgaagtttttgagccagccaccctgtcatcaatcttggttatgcagttcatttattcagtagaccccaggttcccatccacgtttggtgcacaggagaactcccctgctcaggaattctgaattaaggaggctttgaatgaacgaggctctactgaatttaaattccagatggggcagggaggggctgggtactggtgagcggcacagactgggcaggtagatgcggcaggagttcgaatccag

SEQ ID NO: 3901 - DNA, 661 bp, Homo sapiens
  misc_feature [331]..[331]: Chromosome 9, SNP identification no. = rs7849964
  misc_feature [331]..[331]: allele = a, in linkage disequilibrium with rs4836648, respectively
  misc_feature [331]..[331]: n is a, t, c or g
acttactgagcaccaactgtgtacccggcctcacactgttctcatacacaacagctccacggggaaggcattctcaccgagattcagagaggggcagacctggcctcgggtcgcacagctgggaaccggacaccgggctctctccagtcagctcgggtgctgctggccccagcacctcccccatggcgtggaccagggcctccgaggctgctttaaagaaggttctttgagaacggcgcatgtaccgtgtggacactcgtgtgcgcccctgaagtttttgagccagccaccctgtcatcaatcttggttatgcagttcatttattcagtanaccccaggttcccatccacgtttggtgcacaggagaactcccctgctcaggaattctgaattaaggaggctttgaatgaacgaggctctactgaatttaaattccagatggggcagggaggggctgggtactggtgagcggcacagactgggcaggtagatgcggcaggagttcgaatccagcccctaccgtttctcagatctgtgactttggaaaaatcactttctctggccctcaattttgccatctctaaagagggggctgaatgaattcagacaccccaaggccccacaaagtgctaacgactgagatacgctggggttggaggtg

SEQ ID NO: 3902 - DNA, 661 bp, Homo sapiens
  misc_feature [331]..[331]: Chromosome 9, SNP identification no. = rs10760603
  misc_feature [331]..[331]: allele = c, in linkage disequilibrium with rs4836648, respectively
  misc_feature [331]..[331]: n is a, t, c or g
aaatactccaagccctttccctccttacaggctttggcctgggctgcgctggccaacagaactccctctcccctccgctgcatccctctcttgctctgccttctccaggaggcctttgtgaacgttctgtggacatgggctctccatgagtctctcagctcgtgtttgcttccccctgagccagggtagaggctcctgcacgctgagtccttatctgtgttgcgccgaccccagtgcctaggcagggcctgggccccagggcccctctggatctgttgaaagaagaggtcagagggctgtgtcatctaaaccccgtttgcattgagagagncattcttactgccacatatccatgcattcatttgttcattcaacagaaagcaccaggccctgggcgattgagggttgaaagagacactggcccctgcccttgtgaatccctttccagccaggtgtgtcaggggcgctgggcgggtgaggccggcactgagcaggtgagacccaaaaacaaacaccacctggcgatttctctgttttctcccacacagtccccctttttggatgttaagagattaatatatgcaaatacccttttcctatggtggttttagccttgcactctgtggattaagttacttgatttaaatacatcttcccccca

SEQ ID NO: 3903 - DNA, 661 bp, Homo sapiens
  GLTDC1
  misc_feature [331]..[331]: Chromosome 9, SNP identification no. = rs1333241
  misc_feature [331]..[331]: allele = c, in linkage disequilibrium with rs1333233, respectively
  misc_feature [331]..[331]: n is a, t, c or g
tgggatgatgcactcaaacacggagctgggcgcgcactaggtgctctctaagcattaggcattactgctcggcacctgctgccggcgcctcagtaaagcactccctgtttaacttggttcttgttccacagaaaacgccctgatgttataacgaaaacagactggctcgctcctgtcctatgggaagggactttcgacaggcgggtcctggaaaaacattacagaaggcggaatatcactgtgggcctggccgtctttgctactggcaggtaggtgccactcacctttgcccttttttattttgggaaaatgtggatcagcattcacgagnctttaacctccaaagagccaaccataattaagcataattagtgataacaatagccacgatttctggggagaaacaaacttacctgtccaaacccaaataagggactcaaagacctggagaacagtgaaagtgagacttttagtgacagtcttgcaagatcggatgtctgatgggcaggcacacccagcacagtttcaactgcaatttatcccctagtgcacaggtccctccctcagttcctcataggctgagtacttggggtcacaatcttcccagacgtcgcctatttgttgttgggcaggggctttaggtgttttctttagggtggtc

SEQ ID NO: 3904 - DNA, 661 bp, Homo sapiens
  GLTDC1
  misc_feature [331]..[331]: Chromosome 9, SNP identification no. = rs7037835
  misc_feature [331]..[331]: allele = g, in linkage disequilibrium with rs1333233, respectively
  misc_feature [331]..[331]: n is a, t, c or g
ccgtccctatttgcagattacataattgtctacatagaaaatcctaaggaatcttaaaaaaaaaccaatatctcctagaactaacaagtgaactcagcaaagtttcaggatacaagatcagcacattaaaaattaatctcattactatgaacaatgaacatgcagaaagtaatatttaaaacacatgctatttacagtttctccaaagaaaatgaaatactttgatatatcactacccaaaagcagtcactccccattcccttctccctgcaatccctgcaacaactcatctactttctgtctctgtagatttgcctgttctggaaatatngctgaataatattccattggatggctagaccacattttgtttatatgttcattagttgatgaacatttgagttatttacactttctggctattacaaatactactattaaaattcatatgtgagtttttgtgtgaagataggtttttaattctcttggatatatatctagaggtagaattgttgggtcatatggtaattctatggttaactttttgaggaactgacaaactgtcttccataaaggctgcaccattttacattcccaccaaaagtatatgaaatttcaaatttctccacatcctcaccaacacttttttgttatctttttt

SEQ ID NO: 3905 - DNA, 661 bp, Homo sapiens
  GLTDC1
  misc_feature [331]..[331]: Chromosome 9, SNP identification no. = rs1333237
  misc_feature [331]..[331]: allele = a, in linkage disequilibrium with rs1333233, respectively
  misc_feature [331]..[331]: n is a, t, c or g
taaacaaaccagggtctgttgatcaagaaccaggcgatgattgtggtcatgaagaagcagacgctctctacctggcttagctttcctggtttatgcagtgcgagaaagtctcttcggaaccagcttgaatatgccactgatgacgctgcttgactttggtggcagcactcaggggcagcctcatcctttgtaaagtgtatgtggtttcaactttgtgttgtgttcctatgtagctttggggttatttacagtttgggggctattgcaggcaaagttctggtgactaaatgtaacccgtcttttttttttttacacagatatatgacttccngtgtgagacacatttctaaaatgaagttattaggccaaagaatgcagacatttaaaatttttgatgtaaattttaaattgctaaatttacttttaataatggtaccattttatcttcttgtctacagtgcataaactaaagtattaccagctttttcatgtttggcaaagctgctagttaaggcatctcaattcaatttgcatgtctgtaattgtttaagtatcttttttttttttttgtagagacagagttttgctcttgttgcccaggctggagtgcaatggtgtgatcttagttcactgcaacctctgcctcctgggtcaagtgatt

SEQ ID NO: 3906 - DNA, 661 bp, Homo sapiens
  GLTDC1
  misc_feature [331]..[331]: Chromosome 9, SNP identification no. = rs1333236
  misc_feature [331]..[331]: allele = g, in linkage disequilibrium with rs1333233, respectively
  misc_feature [331]..[331]: n is a, t, c or g
tccccagtcaccaaattcagctctcctgggacgtttccagaattggagttttattttcgaggctcttataaacaaaccagggtctgttgatcaagaaccaggcgatgattgtggtcatgaagaagcagacgctctctacctggcttagctttcctggtttatgcagtgcgagaaagtctcttcggaaccagcttgaatatgccactgatgacgctgcttgactttggtggcagcactcaggggcagcctcatcctttgtaaagtgtatgtggtttcaactttgtgttgtgttcctatgtagctttggggttatttacagtttgggggctantgcaggcaaagttctggtgactaaatgtaacccgtcttttttttttttacacagatatatgacttccggtgtgagacacatttctaaaatgaagttattaggccaaagaatgcagacatttaaaatttttgatgtaaattttaaattgctaaatttacttttaataatggtaccattttatcttcttgtctacagtgcataaactaaagtattaccagctttttcatgtttggcaaagctgctagttaaggcatctcaattcaatttgcatgtctgtaattgtttaagtatcttttttttttttttgtagagacagagttttgctcttgt

SEQ ID NO: 3907 - DNA, 661 bp, Homo sapiens
  GLTDC1
  misc_feature [331]..[331]: Chromosome 9, SNP identification no. = rs1333234
  misc_feature [331]..[331]: allele = a, in linkage disequilibrium with rs1333233, respectively
  misc_feature [331]..[331]: n is a, t, c or g
tttggtaaataaattaattgaatctatgtttttgtctgaatatacattctcttagctgatctgttcatctccttttattaaaaaaatcttcctcccaacactcatactctttcctgatattctgcttttggccatgacctcctttccctacatctctttcctagactagctcatacccttccccacccagctgagatatctcttctctgggaggcttcccctgactctgatttgggttgatgcatgttgacgaaacaccaaacggggcctgcctatcacaggctcaataaacattgaacaggctccttgcaatcacttgattttctctttntatccaggaatcaccaagtagaagaacttcggctctcagactggtttcatcctaggtaagaacaaaaatgcctgtttacatgcacacacaaacaatatacttcaattggaagtaacaggtttttcttccccagtcaccaaattcagctctcctgggacgtttccagaattggagttttattttcgaggctcttataaacaaaccagggtctgttgatcaagaaccaggcgatgattgtggtcatgaagaagcagacgctctctacctggcttagctttcctggtttatgcagtgcgagaaagtctcttcggaaccagcttgaatatgcca

SEQ ID NO: 3908 - DNA, 661 bp, Homo sapiens
  GLTDC1
  misc_feature [331]..[331]: Chromosome 9, SNP identification no. = rs1333233
  misc_feature [331]..[331]: allele = t, c
  misc_feature [331]..[331]: n is a, t, c or g
taaatgcaaacagaatcaaagatgaacttctggatgcctcctccccacctctttacaacatagagcagaaccactaatgtttggtaaataaattaattgaatctatgtttttgtctgaatatacattctcttagctgatctgttcatctccttttattaaaaaaatcttcctcccaacactcatactctttcctgatattctgcttttggccatgacctcctttccctacatctctttcctagactagctcatacccttccccacccagctgagatatctcttctctgggaggcttcccctgactctgatttgggttgatgcatgttgacnaaacaccaaacggggcctgcctatcacaggctcaataaacattgaacaggctccttgcaatcacttgattttctctttgtatccaggaatcaccaagtagaagaacttcggctctcagactggtttcatcctaggtaagaacaaaaatgcctgtttacatgcacacacaaacaatatacttcaattggaagtaacaggtttttcttccccagtcaccaaattcagctctcctgggacgtttccagaattggagttttattttcgaggctcttataaacaaaccagggtctgttgatcaagaaccaggcgatgattgtggtcatgaagaag

SEQ ID NO: 3909 - DNA, 661 bp, Homo sapiens
  GLTDC1
  misc_feature [331]..[331]: Chromosome 9, SNP identification no. = rs11103109
  misc_feature [331]..[331]: allele = c, in linkage disequilibrium with rs1333233, respectively
  misc_feature [331]..[331]: n is a, t, c or g
agtcaggggaagcctcccagagaagagatatctcagctgggtggggaagggtatgagctagtctaggaaagagatgtagggaaaggaggtcatggccaaaagcagaatatcaggaaagagtatgagtgttgggaggaagatttttttaataaaaggagatgaacagatcagctaagagaatgtatattcagacaaaaacatagattcaattaatttatttaccaaacattagtggttctgctctatgttgtaaagaggtggggaggaggcatccagaagttcatctttgattctgtttgcatttattttatttatttattttaagagatgngttctcacttgcatgatcatagctcactgcagcctcaaacccctgagctcaagccatcctcccacctcaacctccaaagtatctgggaccacaggcacaagctacctccctttgcatttcaacactgcgttcttctagagtgtaattgtgcttttaagctaattattaaattagcaagcttattaggcaacctctgtttcataaccctgggagcaatttttttttttttgagacaggctctcactctgctgcccaggctggagtgcagtggcatcatcacaattcactgcagtctcaacctcctgagctcaagcaatcctcccacctcag

SEQ ID NO: 3910 - DNA, 661 bp, Homo sapiens
  GLTDC1
  misc_feature [331]..[331]: Chromosome 9, SNP identification no. = rs6537908
  misc_feature [331]..[331]: allele = a, in linkage disequilibrium with rs1333233, respectively
  misc_feature [331]..[331]: n is a, t, c or g
aggaagatttttttaataaaaggagatgaacagatcagctaagagaatgtatattcagacaaaaacatagattcaattaatttatttaccaaacattagtggttctgctctatgttgtaaagaggtggggaggaggcatccagaagttcatctttgattctgtttgcatttattttatttatttattttaagagatgcgttctcacttgcatgatcatagctcactgcagcctcaaacccctgagctcaagccatcctcccacctcaacctccaaagtatctgggaccacaggcacaagctacctccctttgcatttcaacactgcgttcntctagagtgtaattgtgcttttaagctaattattaaattagcaagcttattaggcaacctctgtttcataaccctgggagcaatttttttttttttgagacaggctctcactctgctgcccaggctggagtgcagtggcatcatcacaattcactgcagtctcaacctcctgagctcaagcaatcctcccacctcagcctcccaggtagctgggaccacaggggtgtgccatcacacccggctaacttttaaattatttgtagagacagggtctccctgcgttgcctaggatagtaaccctgggatatttttaagtgaaagaaatgactt

SEQ ID NO: 3911 - DNA, 661 bp, Homo sapiens
  GLTDC1
  misc_feature [331]..[331]: Chromosome 9, SNP identification no. = rs11103113
  misc_feature [331]..[331]: allele = t, in linkage disequilibrium with rs1333233, respectively
  misc_feature [331]..[331]: n is a, t, c or g
caaagactgctctttctccccgttttctttataagaaagcgctgcgcgcaacccaaacttcaggactggggcgtcaggttctgtgtcgttggtagtggagaatctacagacatgatttggaattcttctgcatatgggagatttgtctcttctcccttcttccttccttctatccttccaacatccagccaacctgtcttccttcctttcttccttctttttgctcctccaatcattcatttacatcagtatgaacttgtggaagttcgtttcatactttgggttataattcaatgttactttcttttcttgctcaaaaggcttcagcttnggccatcgggagctctcccagttagctcccatgtcccatttaagtgacatactcccttcaatatagaatttgtaaaaaaaatcccttccatccctcctggcactatgagatgctctgggctcatcttgtaaatctcctgtccgaatctagaaccatccacttctccaagaagccttggtcgctttcctggagaatggtgccagaaaccaagatctgttgctttcctggagaatggtgctagaaactaaggtctgctgctttcctggagaatggtgctagaaacaagatctgttgctttcctggagaatggtgctagaaaccaagatctgt

SEQ ID NO: 3912 - DNA, 661 bp, Homo sapiens
  GLTDC1
  misc_feature [331]..[331]: Chromosome 9, SNP identification no. = rs11103114
  misc_feature [331]..[331]: allele = g, in linkage disequilibrium with rs1333233, respectively
  misc_feature [331]..[331]: n is a, t, c or g
gatttgtctcttctcccttcttccttccttctatccttccaacatccagccaacctgtcttccttcctttcttccttctttttgctcctccaatcattcatttacatcagtatgaacttgtggaagttcgtttcatactttgggttataattcaatgttactttcttttcttgctcaaaaggcttcagctttggccatcgggagctctcccagttagctcccatgtcccatttaagtgacatactcccttcaatatagaatttgtaaaaaaaatcccttccatccctcctggcactatgagatgctctgggctcatcttgtaaatctcctntccgaatctagaaccatccacttctccaagaagccttggtcgctttcctggagaatggtgccagaaaccaagatctgttgctttcctggagaatggtgctagaaactaaggtctgctgctttcctggagaatggtgctagaaacaagatctgttgctttcctggagaatggtgctagaaaccaagatctgttgctttcctggagaatggtgctagaaaccacgatctgctgctttcctggagaatggtgctagaagccaagatctgggtaccaggtgtgctcattgcttccagggtgtccttcctccgaggccctctcagctaacagagc

SEQ ID NO: 3913 - DNA, 661 bp, Homo sapiens
  GLTDC1
  misc_feature [331]..[331]: Chromosome 9, SNP identification no. = rs11103116
  misc_feature [331]..[331]: allele = c, in linkage disequilibrium with rs1333233, respectively
  misc_feature [331]..[331]: n is a, t, c or g
gtgctagaaactaaggtctgctgctttcctggagaatggtgctagaaacaagatctgttgctttcctggagaatggtgctagaaaccaagatctgttgctttcctggagaatggtgctagaaaccacgatctgctgctttcctggagaatggtgctagaagccaagatctgggtaccaggtgtgctcattgcttccagggtgtccttcctccgaggccctctcagctaacagagcaaggaaatagacactaacctgtgcgtatttccacatatctttaaacacgttgacacgtaaatgtctctgttcatagtaaggtaaacgtgagttcangctgaggtctccagcttcaatccattcccacgtggatcactgtggccccctctcttgcttaactatgaagttccctccaacagcaagaaacttgctcccccatgcctcatccatttatttaattgattcaaatatacatgtatagcagcagcagaattgttaactcatattcctgtgggaaaaaacctttattgacccaaatacatgtacagtgctcatgtacagtttctattgcctttactttcaaactccactcatacccagctgggcactgtggctcacacctgtaatcccagaattttgggaggctgtggcaggcggatcacctga

SEQ ID NO: 3914 - DNA, 661 bp, Homo sapiens
  misc_feature [331]..[331]: Chromosome 10, SNP identification no. = rs9424191
  misc_feature [331]..[331]: allele = t, in linkage disequilibrium with rs9423936, respectively
  misc_feature [331]..[331]: n is a, t, c or g
cgcagcagtttgggaggccgaggcgggtggatcacctgaggtcaggagtttgagaccagcctggccaaaatggcgaaaccccatctctactaaaaatataaaaaattagccaggcgtggtggcagacacctgttatcccagttactagggaggttgaggcaggagaattgcttgaacaggggctgggggtggggggcggaggttgtagtgagccaagattgcaccactgcactctaggctgggcaacaagagtgacgttccgtctcaaaaaaaaaaaaaaaagacttagaatagccaaacatacttgaaaaagaacaacattgtatactangcaaattcaaaccatgacacacccttcagagtggctacaattcaaaagtattggcagggatgtagacgaactagaattatctttgtggaactgtataacttagtaaaaccagcttgcaaaaagtttgaaatgatctgctaaagttgaacatatgcccttgttattgccacaataatgccctataataaatcaccccaaactcggttagcttttgataacagcattaactttcagaatccttgatcttcaggatgtctaaggctctgttaatccaaagtgtgttggactgtgggttggtgtcacatctgttccacataggtttgttctgga

SEQ ID NO: 3915 - DNA, 661 bp, Homo sapiens
  C10orf18
  misc_feature [331]..[331]: Chromosome 10, SNP identification no. = rs9423936
  misc_feature [331]..[331]: allele = a, c
  misc_feature [331]..[331]: n is a, t, c or g
ctcagaaggctgaggcaggggaatcgcttgaaaccaggaggcagaggttgcagtgagcccagattgtgccactgcactctgtctcaaaaaaaaaaaaaaagccatattcattatgactttttaattttgtgacatgtataaatacattttttattatctacatagtaaatttaaaaagctgcatcaaactgtagccggtgaggctgcataaatgatgtgggacgaagagttataataacttgagatcactgtagtgaaaagaacgtgtattttagattagacctgagattgatagatatccttactaggggcttgcgggtaggacacttanggaaattggagcttggagtgagctttgtaaaataatactaaaaccatcctcctagtggggttactgtgtgacgtccaagaactcgggggcagttggcttgctgtcctgtgctccgttctgacgactgagcccgcccaggtctgcagggtcctggggtcctgcgggttctgtagggttccctggtgtgtggagtccctacccgctacaagctccgttgggtctacggagtgtgcggggatctcccagccctgttggctgtacgggctcagtggggtttgcagggatcccctcgttctgtggggtccgtgggcgccgagtcagggccatgcc

SEQ ID NO: 3916 - DNA, 661 bp, Homo sapiens
  misc_feature [331]..[331]: Chromosome 10, SNP identification no. = rs7096778
  misc_feature [331]..[331]: allele = t, in linkage disequilibrium with rs914278, respectively
  misc_feature [331]..[331]: n is a, t, c or g
gtaaatcatggttgctgctgctgcacatggtggcaggggagaggcatgggctggcctggtgaccagtgacatctggaagcccttgagatgctatcaggacatcttgtcagggcttcaggacaagcaataacaacagaaggccaaggttcaaggtgtgtttggggtggagggttgagagctctgatggggatgaaaaatagcaggagagaaggcagactgaaactgacctcgtagggaaatggttcaaactgtgctccctaaggccatggggttttcttcaacgggtctctaaggctactcgggtggggctgaggtagggtgggtgaaggantggaaaccaaagtgtgcagggtgggccgattggagcgggaggattgccgggctgtgtttagaggcaagtatagtggctctcctgtgatctgctccgcatctcgggtttctgtgtgagatctcctttgaagcaagagttctgctgctttatcaaagcatgagcattgtcgtgtgggccttgaaggcaagctgaggcatatgagctttctacggccagcagcggggaagccgggggtgggggcagatcctgatggaagagtaacaagactaaagtgacgctttgttagaaccattcttccgataattcatttgcctggaatgaggagcaaac

SEQ ID NO: 3917 - DNA, 661 bp, Homo sapiens
  misc_feature [331]..[331]: Chromosome 10, SNP identification no. = rs10826719
  misc_feature [331]..[331]: allele = g, in linkage disequilibrium with rs914278, respectively
  misc_feature [331]..[331]: n is a, t, c or g
gtgggggcagatcctgatggaagagtaacaagactaaagtgacgctttgttagaaccattcttccgataattcatttgcctggaatgaggagcaaacacatttgccaggcaggaagggccactacgagatggatcccctctactgtccctctcccttgctaagcctcctcatggccggcagcgtgtctctgctctcccaatgtcctgcctgaaccatggcagcaggcccctaaccctctgctgtgaaactctggcccctccatgggggtcagctctccaaaatcttgtcattccatcccacttgccaaaacgtctagcggttcatttttgnttgtgggattatgaaccacactcttttgcttagcattcaaggccccattatgaagacaatctgccttcctagtcccatctgctaccggtctcacatctgttcccagctggtgaaaccttcttacaggactcggtactcccaacacagtgcctctattttctcctgtacatttcatgccatcctcgggtcctaggatgcatcctctcccccaccacacacacacctgtacttagtttactatcctagtggacttcacacactccgcaagccttttttgaccatgtttggttacatctgtctctttccataggaatgctccaaggaaccctg

SEQ ID NO: 3918 - DNA, 661 bp, Homo sapiens
  misc_feature [331]..[331]: Chromosome 10, SNP identification no. = rs1571759
  misc_feature [331]..[331]: allele = t, in linkage disequilibrium with rs914278, respectively
  misc_feature [331]..[331]: n is a, t, c or g
ggtactcccaacacagtgcctctattttctcctgtacatttcatgccatcctcgggtcctaggatgcatcctctcccccaccacacacacacctgtacttagtttactatcctagtggacttcacacactccgcaagccttttttgaccatgtttggttacatctgtctctttccataggaatgctccaaggaaccctgccacataaatacttatcctggcactaatcagtattttttttagttgtgtcacctaacatagcgctgagctcactgcacatccacaaacccaaataatgttaatgtagctgtactgggaacatttcagatgtntttcctcccaaactggagcacccacttaggccatccttcaaggccagaggccactggtgacctgcccagtccattccctcagcgcctggtctccccagaccagcctgtgaccaacccatgaggtcacaggacaggaacaatacaagggctttgtgtagatgcttgtgttttcagaagtggctcgagtccagccggcattccttcttgactgggactttttaagaaatgttttcccgacaaatgtcagcaggattgagatccaccacacggtttattaaaggaacaaaagctttgccctgacagccccagcagcaatctcggtttcccctg

SEQ ID NO: 3919 - DNA, 661 bp, Homo sapiens
  misc_feature [331]..[331]: Chromosome 10, SNP identification no. = rs10740811
  misc_feature [331]..[331]: allele = g, in linkage disequilibrium with rs914278, respectively
  misc_feature [331]..[331]: n is a, t, c or g
aagaaggacaagaggaatttcgggacctgcggtagagtcaaagcgcttcctgttcctcccttagcccaggccccacttgccagccccaaacagcactgccaccaaggcgtggctcttctcacagatgccacatcatctataaaaagccttctctgccttgcaggtgctaatgttctagggagagacagacactttacaacccgtttcatgagcttcctcttgcaagacgcaggaaccacggcacagatggcttcgttgccattgacaaatcatcctcagggacctttcacagcattgctaggtattaacataagacacaccaggaattacntgcatcaagtcccagtcctcagggagcttcaagtttaagcagaggaatgagatcggccaataataataataataataataataataataataaataataataaataaataagttatgttttcagctagctcaggctagaggccagtgcaattcagggagacagtgtttgttgtaggagctgaagactggcagatgtatgtggctggcttatcagcaaaaggtccaggagccaggatgggaagaacttgagcttgatcttaaggaatgatccatccatggatcagctagggaggagaggagtcctgactgaaatcaagacaccatgcccag

SEQ ID NO: 3920 - DNA, 661 bp, Homo sapiens
  misc_feature [331]..[331]: Chromosome 10, SNP identification no. = rs10508757
  misc_feature [331]..[331]: allele = g, in linkage disequilibrium with rs914278, respectively
  misc_feature [331]..[331]: n is a, t, c or g
ctttccaaagtctagggcaaagctctaagtacttcctgccccttgctcagcaatcgccctgcttatagcagaagagaatagagtgtctagaaagcatcacacaagtctcttctctggagagaatctcacaatgtgagtcctggaagagattgccaagcccccagaagagcaccaccctcattacacaactggaaagagtgaatgccaaattgcctagctcgaggtcagccaactcattaattgaagacagaaagataatgtggaaatcaagcaatgttaccattttgtgatggcttcagacaaagattttacaaggaagatgttggaaacngcgagtgaagtttgggactgggcattatatatgaattgagtttttccctgcattcgacagggtggaacacttgacaggtgactatgggtaagcgagaaataccaagaataaaataatttacacatttgggatgcaagaggctttgtaaagggaccacagaacatcatccattccagacctttgagatgaagtggagccagccactgtgtaggaggctttggagtgggggtgtagacatagatgtcacctttcaggtccaggctgatggacataaagagactcgtactttctgtcttaaaatataatcaacaggcctagtagaaggaagca

SEQ ID NO: 3921 - DNA, 661 bp, Homo sapiens
  misc_feature [331]..[331]: Chromosome 10, SNP identification no. = rs914279
  misc_feature [331]..[331]: allele = t, in linkage disequilibrium with rs914278, respectively
  misc_feature [331]..[331]: n is a, t, c or g
ttaaagtcctctagaatcccattctcccacttattgcttctaagataaaacagagtgttccattcttttgctgtaaagcatgttggacaagaaaatccaactgaaggcttcatggctgtaatttatttgtgctttttttctatccccttgagaaaaaagagaaaaaaaaaaaagcacaggcattgcccaaccgtggacacagcctcataagagtgcgatgtgtgtgcggagtaacagtgcctgggagacaggctgcgcacagataagccaagccaacacccataaaataaaagggcagccctaatgaaagggcagactttgaaagagaaancctgaggccaagcccacttggtgggaaacagatgtgcctatgacctaagatgagatttgtgagcctgactttctcccccgcagttgctggccacgttcaaggtaagccccttctggagccagacagccgtgggctcgctgcaacggagggctgttcagtccagctttcagtcatcactgggttgatcagaaattccctgcacttgagacactaatacaaatgttcttcattaaaaaaaaatactaaacagtgaacatggaagtgacctcagagccagaactttgagggaacattaagataaagtattttacaaatgggtcctcctctgcc

SEQ ID NO: 3922 - DNA, 661 bp, Homo sapiens
  misc_feature [331]..[331]: Chromosome 10, SNP identification no. = rs869376
  misc_feature [331]..[331]: allele = g, in linkage disequilibrium with rs914278, respectively
  misc_feature [331]..[331]: n is a, t, c or g
cagcccagcagctgctctgtctcagggcggactcaagcccttcggttccaacattcccatcagtttcaggaccccttctgtgtcctgaaacttcaaagcaaaatgcttccttttctcaggatggtcagaagtcactggattccctttaaagtcctctagaatcccattctcccacttattgcttctaagataaaacagagtgttccattcttttgctgtaaagcatgttggacaagaaaatccaactgaaggcttcatggctgtaatttatttgtgctttttttctatccccttgagaaaaaagagaaaaaaaaaaaagcacaggcattgnccaaccgtggacacagcctcataagagtgcgatgtgtgtgcggagtaacagtgcctgggagacaggctgcgcacagataagccaagccaacacccataaaataaaagggcagccctaatgaaagggcagactttgaaagagaaaacctgaggccaagcccacttggtgggaaacagatgtgcctatgacctaagatgagatttgtgagcctgactttctcccccgcagttgctggccacgttcaaggtaagccccttctggagccagacagccgtgggctcgctgcaacggagggctgttcagtccagctttcagtcatcactgggttga

SEQ ID NO: 3923 - DNA, 661 bp, Homo sapiens
  misc_feature [331]..[331]: Chromosome 10, SNP identification no. = rs972206
  misc_feature [331]..[331]: allele = a, in linkage disequilibrium with rs914278, respectively
  misc_feature [331]..[331]: n is a, t, c or g
ttctcagtttgttactagactggctatctccccaccatgtttgattaatttttgtctttaaatcagagcaactcctcgtggagctactacatcaaggcaagtagcagatcgagatggaagtcataaccaatgttcccaacaacaagacttcccagcccagcagctgctctgtctcagggcggactcaagcccttcggttccaacattcccatcagtttcaggaccccttctgtgtcctgaaacttcaaagcaaaatgcttccttttctcaggatggtcagaagtcactggattccctttaaagtcctctagaatcccattctcccacttantgcttctaagataaaacagagtgttccattcttttgctgtaaagcatgttggacaagaaaatccaactgaaggcttcatggctgtaatttatttgtgctttttttctatccccttgagaaaaaagagaaaaaaaaaaaagcacaggcattgcccaaccgtggacacagcctcataagagtgcgatgtgtgtgcggagtaacagtgcctgggagacaggctgcgcacagataagccaagccaacacccataaaataaaagggcagccctaatgaaagggcagactttgaaagagaaaacctgaggccaagcccacttggtgggaaacagat

SEQ ID NO: 3924 - DNA, 661 bp, Homo sapiens
  misc_feature [331]..[331]: Chromosome 10, SNP identification no. = rs12261723
  misc_feature [331]..[331]: allele = g, in linkage disequilibrium with rs914278, respectively
  misc_feature [331]..[331]: n is a, t, c or g
cacaaataaattacagccatgaagccttcagttggattttcttgtccaacatgctttacagcaaaagaatggaacactctgttttatcttagaagcaataagtgggagaatgggattctagaggactttaaagggaatccagtgacttctgaccatcctgagaaaaggaagcattttgctttgaagtttcaggacacagaaggggtcctgaaactgatgggaatgttggaaccgaagggcttgagtccgccctgagacagagcagctgctgggctgggaagtcttgttgttgggaacattggttatgacttccatctcgatctgctacttnccttgatgtagtagctccacgaggagttgctctgatttaaagacaaaaattaatcaaacatggtggggagatagccagtctagtaacaaactgagaaggctagaagcctcgtgatgttccctagagttttcctgaaaaagaaccgtagtagaaaaagaatggctcatcccccagcttggttcaaggcccctgggctctgtgcattgtcaggtgtctacaggagtttctctgaggccatctcagcaattcagatccagaaactccagcatctgcctaggaagccattttctctgcaaatgcaccaagcctgagagctggtcttaggagctt

SEQ ID NO: 3925 - DNA, 661 bp, Homo sapiens
  misc_feature [331]..[331]: Chromosome 10, SNP identification no. = rs914278
  misc_feature [331]..[331]: allele = t, c
  misc_feature [331]..[331]: n is a, t, c or g
tgcttggaggactgttggaggacatgggacacatgccttctttgttttgtttcctgtaggacacgttctaggaggactgttagttggtgggggaaacaaagcccactcaggccaccaagggccgttgtccctgcctgaagtatgctaggaccccatgcccaaagggcaggcttgctgtgaacagcctgactaccctctgctgataacccgtggtggggacagagacaattcactactgtgaagttaaaagagcttaagtttcaaggcctctgccctgcacagcctctttcctgtgcagggccctgtccctggtttcgcacttgtaatttantattcttttccagattctcaggtggaataaggtttggccccagaaatcctggatccagtcttggtggataagaggcacatgcctctccaatgacatcacattctgtggaaatttacaggaccagaagtgggttctgaactcaatggagtgcaagaaaagctcctaagaccagctctcaggcttggtgcatttgcagagaaaatggcttcctaggcagatgctggagtttctggatctgaattgctgagatggcctcagagaaactcctgtagacacctgacaatgcacagagcccaggggccttgaaccaagctgggggatgagccattc

SEQ ID NO: 3926 - DNA, 661 bp, Homo sapiens
  misc_feature [331]..[331]: Chromosome 10, SNP identification no. = rs3128248
  misc_feature [331]..[331]: allele = c, t
  misc_feature [331]..[331]: n is a, t, c or g
aaatgaaaattacttcccaagtactaaatggcaaagattgcaaaggagactggggaagtggacatgtctgtccgtgtgtaaattgagatgactgctctgataggacatttggcagtgcataccaaaagtcctaaaaatgcacatattccttctagaattttttctttggggaaaaataatcagataattgtatcctaattgtggaatgaaagccttagggtccaggttgctgaagtgaattattggctttgaaaggacttttagttcctttgaaaggattggctgccctagaagtttccatgagactgtgaaggtctagggaagctgaagncttcacttgctgccatagttctgaacaaatacagtcatttggtgcttagtgatggggacaccttctgagaaatgcatcgttaggcaatttcatctttgaacatcgtagaatgtacttacacaaacctagatggtacctcccattacacactcagtgtaagactcagtgtaaggctcagtggtttagactctattcagtacagtcacatgctagtaactgtactgaatactgcatgcaattgtaacacaatggcaagtatttgtgtatctaaacatagaaatgctatagtaaaaatatggtggtataatcttctgggaccaccgttgtata

SEQ ID NO: 3927 - DNA, 661 bp, Homo sapiens
  misc_feature [331]..[331]: Chromosome 10, SNP identification no. = rs4491167
  misc_feature [331]..[331]: allele = t, in linkage disequilibrium with rs800310, respectively
  misc_feature [331]..[331]: n is a, t, c or g
actaccctcaaagagctcatagtctggaggcagaacagaaaaaaaaataaagcaggaggagtgaatagcatgaaataaggcttgtgggagccagaagaggaaatttccaaaagttgggaggagacccagaagctacacagaggaggcgactttggagacgagtctcgaagggccactctgaggcttgcaggcaggaagggcaccccagggagctgcgtttcagcttgtgaccccttaggaaacccgagccagcctcaggatgcctggagtggaaggagggaagaagagataggagagttgggttctagaaagtgtaggggttccaaacacnaatgggttttgccatgaggacttgcccagcccagacatgtggtccttttgcactctgatttagagagtgcctatagtcccagctacttgggaggctgaggcaggagaattgcttgaatccgggaggtggaggttgcagtgagccgagatcgctccactgcactctagcctggagacacagcgagactccatctcaaaaaaaaaaaaagaaagaaaagaaaaaagaaaaaaaagagagtgcaattcctacattctagtgcaaggatggttttgctcaatcctggcaccctaaaatcagggaatggtgagagtccaggttataacccagaac

SEQ ID NO: 3928 - DNA, 661 bp, Homo sapiens
  misc_feature [331]..[331]: Chromosome 10, SNP identification no. = rs2146807
  misc_feature [331]..[331]: allele = t, in linkage disequilibrium with rs800310, respectively
  misc_feature [331]..[331]: n is a, t, c or g
ggagggactagctgttgactttcctcacctctttctttatgccctgagccaggcaccctgtgttgctctgtggcaaagaaaaagtgtttccattttcaatatgtggcttaactgcatgcagcagtggaagttgctgtgcctagccctgctcgcggggccacaggcttcttgaggctgtgaggaatattgcttttctccttgcacttgagaagggatgtagacctgtgggtccctctcctccatcttctcctgctattgtattattgtcttatattgtattatacaatcttctgtcccagagcacattgcccattctaggcatccattttcntgcccaaagtcctgtttcagttcatggagaaattgatcccattcactttttttgcacccagaatgtgaaagtcagagatctggagtacaactgcgcccatttggctgcagaaagcaaaatggatctctgtattttctacccgatgcatcttcatcaacatgatccattctctgatatgcatagcactctacgagttgccaattttcacatccatttttcttatttgatattcacctatttagttagaaagtaaaagtagatgtaatttccccccatgttatagagggggaaattaaagagaaggcaggcaaaatgcttttgtcaaacaaa

SEQ ID NO: 3929 - DNA, 661 bp, Homo sapiens
  misc_feature [331]..[331]: Chromosome 10, SNP identification no. = rs7082209
  misc_feature [331]..[331]: allele = a, in linkage disequilibrium with rs800310, respectively
  misc_feature [331]..[331]: n is a, t, c or g
tccccccatgttatagagggggaaattaaagagaaggcaggcaaaatgcttttgtcaaacaaagaaagtggtaggttttctgatatctagcctaaactatttcagatataccaggatgtaacaaagagaacatacttgtctgttagtctattacatgctaagatatcactatttaggtttaaatatattatacagagatcatggggagaaattggcctctgcaactttgaagatgccaatatagcttcaaacagctcttgaggtatgtgagagctggcaaatgaaactgactggtagtgagaatcacataaaaagtcaatcatgcaacttnataaatgtcacttacagaaaacccatggtaccatcttactggtgaaataatggatgctttccctctaagatcaggaacaataccaggatgtctgtacttgtcacttctatttgacattgtacgggagattctagcagggtggcaattagacaagaaaaagaaacaaaagggagccaaatcggaagggagaattcgaactacaattgcagatgccatgatcttgtatttaaaaactccaaaggagtccagtaagaaagcattaaaactattacaaatgagttcagaaatgtttctggatacaaaatcaatctactcacatttatgatagta

SEQ ID NO: 3930 - DNA, 661 bp, Homo sapiens
  misc_feature [331]..[331]: Chromosome 10, SNP identification no. = rs800310
  misc_feature [331]..[331]: allele = a, t
  misc_feature [331]..[331]: n is a, t, c or g
aactgcaggcagaaaataagtgagtacaatccaacaagatattttgagagacagagagactacattcacataacttttattactgtatattgttataattgttctattttattatgttaattatgctaatctcttactatgcctaatttataaatcaaaattataggtatgtatggaaaggaaaaaacataggcttcagtactatctgtggtttcaggggtgcactgggggtcttggaaagtatcccccacagataaagaggtctattgtgttatttctgtatactaacaatgaacaacctgaaagtgaaactaaacaattccatttacancatcatcaaaaagaatagcatacttaggaataaatttaacaaaagaagtagcggacttttacaccaaaaactgcaagatatcattgaaatacatttaataaaacctaagtaagggccgggcatgttggttcataccagtaattccagcactttgggaggccaaggcaggtagaccacctgaggtcaggagtttgagaccagcctcatcaacacggtgaaaccccgtctctactaaaaataccagctgggtgtggtgacacgtgcctgtaatcccagttacttgggaggctaaggcaggagaatcgcttgaacccgggaggtgaaggttgc

SEQ ID NO: 3931 - DNA, 661 bp, Homo sapiens
  misc_feature [331]..[331]: Chromosome 10, SNP identification no. = rs9422606
  misc_feature [331]..[331]: allele = a, in linkage disequilibrium with rs800310, respectively
  misc_feature [331]..[331]: n is a, t, c or g
caaaatggatcaaagacttaaatgaaataactaagactataaaattctcatagaaaaaaatagggtatatcttcatgaccttgcattttaagatatgacaccaaacacacacacacacacacaatcagacaagttgaacttcatcaaaattaaaaacgtgtatcacaagatattatcaagaaaatgaaaagacaactcacatgggagaaaacatttgtatataatatatttgataagagtctagtatccagacaaataacctgatttaaaaaatagatgaaggatttaaatagccgtcactccaaagataaacaaatggccaataagcacncgagaagatcttcaacttcattaggtaagtgcaaatcaaaaccactttatgcctacaaggacaactataataagaaggagagataagaacaagtgttggcaaggatgtggagaaactgaaatcctcatgcactgttggtgggaatgtaaaatggtgtagctattttggaaaacaatttggcagtttctcattaagttaaagtaggattaccatatgatccagcaattccactggatgtgtaatcaagataacttaaaaatatgtccacataaaaacttgtacatgaatgtttatagcagaattgttcataatacccaaaaatggaaacaa

SEQ ID NO: 3932 - DNA, 661 bp, Homo sapiens
  misc_feature [331]..[331]: Chromosome 10, SNP identification no. = rs977754
  misc_feature [331]..[331]: allele = t, in linkage disequilibrium with rs800310, respectively
  misc_feature [331]..[331]: n is a, t, c or g
ttgcctgagggaagggaagaaatcagatttcaatgtgatgactggatgccatatgtatggcaggtgagttcatcatgtgggtgagcagggctcccgtttatacaatgttagagtctacttaaactctaccaccataggagtgtggatgttgttaccattaggatcacacagttgtccctgggtggaccttctcttgtggatggcatgcttcccttctgtcaccacaagtgagatatggagtcctaggccctgaacaggttaccttgatgctggtaaccctaaaatcaaatacattttcaataagaggttctgtggtcatgctagctttcantttcactcagatgatggagaataaattgttcagattcagaggctaaactttgtcatgagtggatatagattatcctagaaactcagcccctgagccttatccaacagaagcactggggggcttccaagcagagaaaagcagggccactcttgctgaatcaagagcaggggtcacagggctgcctgcccaccttctagcatagcccatcatgtgcccagacctcagtttgcctctgccctcaccatcgtggcacctttgccatggtttaaatccactttattaagactgctttcagttactagactaatttccatcataccccaaggcaga

SEQ ID NO: 3933 - DNA, 661 bp, Homo sapiens
  misc_feature [331]..[331]: Chromosome 10, SNP identification no. = rs2476351
  misc_feature [331]..[331]: allele = t, in linkage disequilibrium with rs800310, respectively
  misc_feature [331]..[331]: n is a, t, c or g
agaaggaaagaaggaaggaaagaaaagaaagaaagaaaaagaaggaaagaaagaaagaaagaaggaaggaaggaaggaaagaaagagaaaaagaaagaaagaaagaaagaaagaaagaaagaaagaaagaaagaaagaaagaaagaaagaaagaaaggggaagtgaaagggaaaggaaaggaaaggcaaaggaaaagagagaactgagagacagatacagggggaagaggctatgtgagatggagatgggaattctgttcccacaaggctgaggaggctgaggtttgccacagccaccagcagctgggtgaggcaaggaaggatcctcccntagaggcactggagggagtgcagctcacctgacaccttcatttctgccttctgacctccagaagtgtgagagcataaacttctgtcatttcaagccaccaagtttgtggtgatttgttagaatagccatgagaacctaagaaacctgctgaagagccaagagtgatgtccccgttgaaatcattgaagtgacacctgcagatatcactcatttcctattcttttgattacctggcttgtagagtactctctgcttctcaatatgtgagacataaatgaaacaaaacctgcagctgcagtagctttccagtatgtttggtttaggctgtga

SEQ ID NO: 3934 - DNA, 661 bp, Homo sapiens
  misc_feature [331]..[331]: Chromosome 10, SNP identification no. = rs2505740
  misc_feature [331]..[331]: allele = c, in linkage disequilibrium with rs800310, respectively
  misc_feature [331]..[331]: n is a, t, c or g
gaccacgccttcctggaagggttactgagagaattagttgtcagagcacttggcatatcatatgccaagctatgtgatctgagctgttataatgctgacctacctcactcctcttctccagcaggaggcaagtaatggtagcactcacagtggctctctggaaatatgaaattgcatgcacgtgttttgtggtgtgtgtgtgtgttggtacagtgtgtgtatttttaggtgtgaagtgtgttcatcaaacagctgtacttagataaacgggaaaaaccatgacaccctaggcagtttagctctagaaacatccaagttttccaagcagtcntcctttgagagtaaagcatcaaagaattaagtcacttagtcacacattttcaatctctgtaacattttcctcattcatcccaggactgtcaacacagctgttactaggcctaggtgtagacagctttctaaacggagtggtaggtccattggttctggtttaatagacaaggtattagatgttttccaactttggctactgtactcaataaatcatcttctctggaggaaataaaaaggaaaaaaaaaaggagaaggagaagagaaaagacatcaatcttgactgacgacgatccccggagcttctcttgcagggaagggtttaggaaga

SEQ ID NO: 3935 - DNA, 661 bp, Homo sapiens
  misc_feature [331]..[331]: Chromosome 10, SNP identification no. = rs2505743
  misc_feature [331]..[331]: allele = g, in linkage disequilibrium with rs800310, respectively
  misc_feature [331]..[331]: n is a, t, c or g
gaaaccaacaaaaaacaacaaaatggcagatgtaagtcctgatgtgccaataatgtaaatgatctaagtataccaatgatctaagtacaccttaaatgtaaatgatctaagtacaccaattaaaagaaattgacaaagtgaattttaaaacatggtaaaaagtattctgtttgcaagacacataaaatgaaatgacacacagatttcatagccagtgagtgatctaggtaggttgaaagtgaaaggatggaagaagatataccattatacataatttttataaagtagaagtagatacattaatatcaggtaaagtagacctgaaaagaangaaaaaagtaactagagataaaaatgagatcccataatgataaaaagattgatcctctaggaagccatgataatcctaaatatgtatccaccaaaaaacaaagccttaaaaaacatgaataaaaaactgatggaactgaaagaagaaatagataaatccacaattatagttacacacttcaacaccccccactctcagtaattagaagaactgaagaacaccaacaaacaggaactgcctggcatttatagagcactctagtcaatgccaacagaatacacattcttttcaagcatccatgaagcattcaccaagatagagcatattctg

SEQ ID NO: 3936 - DNA, 661 bp, Homo sapiens
  misc_feature [331]..[331]: Chromosome 10, SNP identification no. = rs1370158
  misc_feature [331]..[331]: allele = c, in linkage disequilibrium with rs800310, respectively
  misc_feature [331]..[331]: n is a, t, c or g
catctcatgaactttgatgcaaaaatcataaacaaaatattcacaaagtgaattctgtaatgtataaaaagaattataagccatgactaagtgggatttattttaattgtgcaaggctagttcaacatttgaaagtcaatcagtgtaatccaccatatatatcagcaggctaaataagaaaagccacatgatcctatcaattgatgcaaaaatgcaaaagcatttgacaaaaaaggaaagtaaaattctccacagaaaacaagttgtgctggccttatccaggtgtgcaaaggaggaaatgaacaatctttgtgctctggccttggaaaanaaggaagtgtaaactaggacacagatacagagaaagatgaagataaagcacttggattacaggctcagagaggctaagtcatttgcttaatgtcacattaccagtaattgagaatcatatcttttgatggaaaacccatagatatgtacaccagagtaccctggaattatgctcttgatcaatgtctttccaattatatttgtatattcatatatattttcttggtccattttctactgctataacagaatactacaaagtagttaattcataaataataaaagtttatctggttcatagttctgaaggctaggaagtccaagatcaagg

SEQ ID NO: 3937 - DNA, 661 bp, Homo sapiens
  misc_feature [331]..[331]: Chromosome 10, SNP identification no. = rs2028102
  misc_feature [331]..[331]: allele = t, in linkage disequilibrium with rs800310, respectively
  misc_feature [331]..[331]: n is a, t, c or g
atggaaaacccatagatatgtacaccagagtaccctggaattatgctcttgatcaatgtctttccaattatatttgtatattcatatatattttcttggtccattttctactgctataacagaatactacaaagtagttaattcataaataataaaagtttatctggttcatagttctgaaggctaggaagtccaagatcaaggggccacatctgatgagggccttcatgttgtgtcatcccatggtggaaggggtcacatgactagagagcacacacaagggaaaaaatctgggccaaactcatccttttatcaaaagcccactcctgcnacaactagcccactcttatgataatagcattaattcattcatgagggcagagccatcaggtcctaatcaccttttaaagaccccacctcttaatactgttgcaatggcaattaagttttcaacacatgaaattttagggacatattcaaaccatggcatatagatatagatagatacagatattgatataagttgagtatcccttatttgaaatacttggaaccagaagtgtttcagatttcagattttttcagattttggaatagttgtactatagtggtcaaacatctcaaatcagaaagtctgaaatttgaaatgctctaatgagca

SEQ ID NO: 3938 - DNA, 661 bp, Homo sapiens
  misc_feature [331]..[331]: Chromosome 10, SNP identification no. = rs1436931
  misc_feature [331]..[331]: allele = c, in linkage disequilibrium with rs800310, respectively
  misc_feature [331]..[331]: n is a, t, c or g
ccaagatcaaggggccacatctgatgagggccttcatgttgtgtcatcccatggtggaaggggtcacatgactagagagcacacacaagggaaaaaatctgggccaaactcatccttttatcaaaagcccactcctgccacaactagcccactcttatgataatagcattaattcattcatgagggcagagccatcaggtcctaatcaccttttaaagaccccacctcttaatactgttgcaatggcaattaagttttcaacacatgaaattttagggacatattcaaaccatggcatatagatatagatagatacagatattgatataanttgagtatcccttatttgaaatacttggaaccagaagtgtttcagatttcagattttttcagattttggaatagttgtactatagtggtcaaacatctcaaatcagaaagtctgaaatttgaaatgctctaatgagcatttcctttgagtgtcatgtaagcactcaaaaagtttcagattttgaaacatttcggatttaaaaattttagttttggaatgctccacctgcatacacacacatatgtgtgtatatattgcagaaatgaagaacagcatttctcaagagaagagagtgaatacagcaatttgaaatttttgcaataatttgaa

SEQ ID NO: 3939 - DNA, 661 bp, Homo sapiens
  misc_feature [331]..[331]: Chromosome 10, SNP identification no. = rs1836982
  misc_feature [331]..[331]: allele = c, in linkage disequilibrium with rs800310, respectively
  misc_feature [331]..[331]: n is a, t, c or g
aatcagaaagtctgaaatttgaaatgctctaatgagcatttcctttgagtgtcatgtaagcactcaaaaagtttcagattttgaaacatttcggatttaaaaattttagttttggaatgctccacctgcatacacacacatatgtgtgtatatattgcagaaatgaagaacagcatttctcaagagaagagagtgaatacagcaatttgaaatttttgcaataatttgaactagtgaatttcattcttaacataatattttagagaaataactggcatgacagcactctttcaggggctcttagttttacagtgatgaaattgaacttcanaacagtaagccttacctgaagtcacacagcttatgaaaggcagcaggtaaagtagacctagtttgctgtctttcaagaaaatgttagctgtgattgcacacctgtattaatcatatgagaaccacatgtattttttaaatgctcatgccatgtaaaaatccagcctcactgtatcgttaattggaattaaaatgtggctataaactgtgttgaattcttttaaaattatgtgggaaatgctttataaacacacagccttggatctcacatatttgttttctcaaatgaacattccagcaaatacggtaaatatccatacatatttaaata

SEQ ID NO: 3940 - DNA, 661 bp, Homo sapiens
  misc_feature [331]..[331]: Chromosome 10, SNP identification no. = rs1144484
  misc_feature [331]..[331]: allele = c, in linkage disequilibrium with rs800310, respectively
  misc_feature [331]..[331]: n is a, t, c or g
gttcttatgaaagaagcccagggagcttaaacacagtgtccatccagttccacactatctgcagtttcaagcatccactggggtctttgaacgcgtgcccctgggataagaggagactattgcagtacatgtatcaacaatttgttgagtaccagttaattgcctgatgcagatctgttctaaatgaagaaacagagaaagagaaaggggagaaaagaaaacaaaccagtgaagcctgacatttttcagaaagggaaagtaacgcctccttccactctggctatgcaggtggtcacagggctgagctggagagaaagatgaaggacaagtngcactgcagaggccaagctcagaagctcaaggctaagttgaccccatacccaggagtgtccagcccagtcctttgcagcaccagagtggaaggaaggcctcctgattccatgcccagccctgcccctgcatctgggtgacagagcaaagggcttttacctaacccacggagtctcctctgtttcttccatgccctaaaaattcagacactgaactcttcttttggggtctcgcagccctgaagattgcatcctgccttttagcatggatgtctttctcccaggtgcagctgcccaatccagaggtcgccaccaccgtaatttacagctca

SEQ ID NO: 3941 - DNA, 661 bp, Homo sapiens
  misc_feature [331]..[331]: Chromosome 10, SNP identification no. = rs1144483
  misc_feature [331]..[331]: allele = c, in linkage disequilibrium with rs800310, respectively
  misc_feature [331]..[331]: n is a, t, c or g
ccagagttcttactgcatcagcagagaatctcagaggaaccagtgagttgaagggtatggtggagacacagagggaggcccagacgggggtctggacccagcccggggctgcagggacagtgctgaggtcagctgccccttgtagttaggacccttcaaagcagatcaattagtccccctaccctggacttcctattacaggctgaattatgtcccctgaaaaaattccagtgttaaagccctaacccccaatacctcagcataggactgtatttgaagacagggtctttaaagaggtaattgtgttaaaataagatcattaaggtgaganctaatttaatatcactggtgttcttataagattaggacataggcatccacagagggaagaccacgtgaagacacagggagaagacagcatctgctcaggggaaaccctgctgacaccctgatcttggacctcccaccttcagaactatgagaaaataaatcctgtggtgtaagcccccagtatgtgatacttagctatggcagcccaagcagactaaaacgcttggtaagagctacccctgaaacaagagggtatgggcagacattcactcgggggctcagcatgagcaaaaacatagagatagggtgtggcttagtaaaataccaacat

SEQ ID NO: 3942 - DNA, 661 bp, Homo sapiens
  ANK3
  misc_feature [331]..[331]: Chromosome 10, SNP identification no. = rs3897459
  misc_feature [331]..[331]: allele = g, in linkage disequilibrium with rs12767186, respectively
  misc_feature [331]..[331]: n is a, t, c or g
aatatggccagcaaagctctgtggtgggagagggtaactggtagtattttgtggggggttttttgccttaagtttcttagtatgttatcttccaatgaaaccttactgatatccagagtcagatttcttgtaaattatttggtggccttaaatggtagtttaaaaacagagccacagattagcaaaatgctcaggccaagcacacaaaccacattatcacagctcggttggtagatgcttttataatacttgcaaaactggcagtgaatttttcttggggttgtttttgtttgttcttgttcttttttgtgtcattattgtcttgtctganttatggtttgatttatttttatctcaactctgatgccttagagtaataccctaacataaacagttgttctgcatgtgcagaatgcaaaatttggagctcattttttttgtgatactacataagccttgcaagtgtgatagcaagatgaattggcttgtggcgcatcttccaaagctagtaactggtactgcactcttttatttggatgcagataagaaagattaatgtgtaatcaatatagaagacaattacaaatagaaaactatcgggataaatgatgactacctcaaatttcatttcttgtgattctttgggctcttcagtagagtt

SEQ ID NO: 3943 - DNA, 661 bp, Homo sapiens
  ANK3
  misc_feature [331]..[331]: Chromosome 10, SNP identification no. = rs7895510
  misc_feature [331]..[331]: allele = g, in linkage disequilibrium with rs12767186, respectively
  misc_feature [331]..[331]: n is a, t, c or g
gggagtgagcgggggtttcctgaagaaggtggcccagatctggttctaaaggacgtgcaggatttgcctggccaagggggtgtgacacacagaggcagagacatacggaggcaaacaagagagtgtctagtctatggaagtgccaagggttagaattagaattaacagagatcaatcagagtgctaggatgtagtgaggtggaggttgggggtctgggacaagtctgaaagggtaggtgtcaggcttggtttgctttgtagaaggcacagccctgattctgatggatcatttctctgagttctgagttggttcctatgagagaaacttagntctaatactttactaacctcagcagctgtttcattaattttgagttttaagacagagtaacccttacttgagaaaagcaccaaggtcgtcttgtgcagggtttctcaacctcagcacatttgacattttgaatcagacgactttttgttgcgggagactgtcctgtatactgtaaactgtttagtagcatccttggccttgacccactagagaccagtagtactatccagttgtgacaattaaaagtacctccagacatgactaaacgccccttgggggacaaaactgcacccactagagaagtactacagtataggatttgatataaat

SEQ ID NO: 3944 - DNA, 661 bp, Homo sapiens
  ANK3
  misc_feature [331]..[331]: Chromosome 10, SNP identification no. = rs10740014
  misc_feature [331]..[331]: allele = c, in linkage disequilibrium with rs12767186, respectively
  misc_feature [331]..[331]: n is a, t, c or g
atttgcctggccaagggggtgtgacacacagaggcagagacatacggaggcaaacaagagagtgtctagtctatggaagtgccaagggttagaattagaattaacagagatcaatcagagtgctaggatgtagtgaggtggaggttgggggtctgggacaagtctgaaagggtaggtgtcaggcttggtttgctttgtagaaggcacagccctgattctgatggatcatttctctgagttctgagttggttcctatgagagaaacttaggtctaatactttactaacctcagcagctgtttcattaattttgagttttaagacagagtaanccttacttgagaaaagcaccaaggtcgtcttgtgcagggtttctcaacctcagcacatttgacattttgaatcagacgactttttgttgcgggagactgtcctgtatactgtaaactgtttagtagcatccttggccttgacccactagagaccagtagtactatccagttgtgacaattaaaagtacctccagacatgactaaacgccccttgggggacaaaactgcacccactagagaagtactacagtataggatttgatataaattatgctttctgtgaaggtgcccttccccttaagcatgtgttttaggttacatttcttgaca

SEQ ID NO: 3945 - DNA, 661 bp, Homo sapiens
  ANK3
  misc_feature [331]..[331]: Chromosome 10, SNP identification no. = rs10732408
  misc_feature [331]..[331]: allele = t, in linkage disequilibrium with rs12767186, respectively
  misc_feature [331]..[331]: n is a, t, c or g
caggcttggtttgctttgtagaaggcacagccctgattctgatggatcatttctctgagttctgagttggttcctatgagagaaacttaggtctaatactttactaacctcagcagctgtttcattaattttgagttttaagacagagtaacccttacttgagaaaagcaccaaggtcgtcttgtgcagggtttctcaacctcagcacatttgacattttgaatcagacgactttttgttgcgggagactgtcctgtatactgtaaactgtttagtagcatccttggccttgacccactagagaccagtagtactatccagttgtgacaantaaaagtacctccagacatgactaaacgccccttgggggacaaaactgcacccactagagaagtactacagtataggatttgatataaattatgctttctgtgaaggtgcccttccccttaagcatgtgttttaggttacatttcttgacatggtgatacatttgcatcaaactcacccaccaacatgtttgtctgcttctcctagggactggcagccctcttcctaaagagttcagaatgcagtctatggccatgatatgcaaacaaactagctggtccctggagatggccctggggctctggctgctaaggctatactctcagtatct

SEQ ID NO: 3946 - DNA, 661 bp, Homo sapiens
  ANK3
  misc_feature [331]..[331]: Chromosome 10, SNP identification no. = rs4948257
  misc_feature [331]..[331]: allele = c, in linkage disequilibrium with rs12767186, respectively
  misc_feature [331]..[331]: n is a, t, c or g
atcccagctacttgggaggctgaggcaggagaatcacttgaacccaggaggcggaggttgcagtgagccgagattgtgccattgcactccagcctgggcaacaagagcgaaactctgtttcaaaataataaataataataatatgtccctcctctacctcatttcaaatacagactgaaaacgtctggccccaacatttgtcctcacagctccacttcaccaaggtttattctgttctctttgctgtgttttaggacaactacaagaccagctctaaaacgttttgatttcttctctagctttatgcttcaagtaggtgtttactccaagnatgcagaaatgtaaataacccattatttgaatcattttgtttactatttaatctaataaaagaatctgctttttaataaattatgtcctaagttgtcctgcctgccgattgagactgtggcacgtatttcagctgccagtggagaactataaaataccagagtccactgtaaaagcttaggtcaaagtcactgcaggtgctttcaccgaggcttctcagaccatttggccacagtccatcccaggatgactggctacaacctccatatgttgtgaaatcttcagagtcagaggaaaatgagagtgggagcccacgccctgttttaggact

SEQ ID NO: 3947 - DNA, 661 bp, Homo sapiens
  ANK3
  misc_feature [331]..[331]: Chromosome 10, SNP identification no. = rs3927694
  misc_feature [331]..[331]: allele = t, in linkage disequilibrium with rs12767186, respectively
  misc_feature [331]..[331]: n is a, t, c or g
tactatgccaagcaacctcttcaaaaaatataagcagtcaatgttctatttaagattaagagttcatttctgccttttatatataggagggaaaatacattaattagcttccttgttctactgccataccgcctatatgtttaaatgaaaataaggtaaaatccttttgtgtcctctctacttggaaaactacagccttcattctgagactagaacacacccttatgttatttgtattgtagttttccactctgttctttgtgtttattgtccctcgttgcttgtctccttttgtgctggaattatttagtatactaatcattgaaacatnatatatatcattggctgtcttctgatttttttagttaattttttttggggggatagttgttttataaattaaaatgtgtatctttaacttactagtgtgaatattataatattacaaattgtaattcctataatgtaataagataattgtatatcatatatattatatataatagagagtgtatatagtatatattatatataatatagaggatatagtatatatctaaatagtatttactgtaatatatattatatattatatactatatgtggtaatatatagtattatatatgtaatactatatatactatgtatatatactatatt

SEQ ID NO: 3948 - DNA, 661 bp, Homo sapiens
  ANK3
  misc_feature [331]..[331]: Chromosome 10, SNP identification no. = rs1340654
  misc_feature [331]..[331]: allele = c, in linkage disequilibrium with rs12767186, respectively
  misc_feature [331]..[331]: n is a, t, c or g
aggctgtggtattttcaggcaggattcagaagacgtttgtttaaaaaccctagcttctcatctctgtcaaatgcagcttccaataaaatgcaatcactttttactcctgaatcatatcgtagatgcctctgtgaagtagaaacaaatcaaaatgaaagtggtacctcagggccactcaacggactactcatattttgattcctcagctaaccaataaaaatgtatcatgccctactatgagtaacgctgtgagctgcacttccactgtctaagcaagcaacagagttaagaaatcccaacatatcaaagaaactcagtgatgttagagctngaaagcctgcctaagagaaccctcatttactgctggtgaaatgtaaatttgtacatgcttgctagaatgcaatttggcagtctgtacaaagagccttcaaatccgtcaccatacatacagggcagagtttggctgctgtggtggaaagggcaggaatgtggagaaagacacagccttgaacccagacacacaccctaaagactgagtctgagcttacatgaaagacccccaacccctagcactagcctagcacagagtaacaagcaagagtagtcaactgctgaggtaaggcaggagtgtggggagacctcctctgtgctgcaggtgtgc

SEQ ID NO: 3949 - DNA, 661 bp, Homo sapiens
  ANK3
  misc_feature [331]..[331]: Chromosome 10, SNP identification no. = rs7908011
  misc_feature [331]..[331]: allele = g, in linkage disequilibrium with rs12767186, respectively
  misc_feature [331]..[331]: n is a, t, c or g
ttcatatgttgatggaatttgaaggtagggtccttggcagggattaatgattagataagatcatcagggtatggcctccacaatgggattggtggctttataagaagaggagaaagacctgaactggacatgcatactcttgttctcaccatatgatgtcctccgccatcttgacaaggccctcaccagatgcagcccctcaaccttggacttcccagcctcctgaactataagaaatttttttctttataaattacaagtctgtggtattctgttatagcaacaaaaaatggactaagacaatagactgtcatgaggataaatgagttantaagtgtagagtcttaagaatggtgcttggcatttagtaaacattataacaattagatgttatattatttgtattacttattatacagacatttagaaatgtatgaaatgactgcatctcacaaggatattatgaaataatttgggtagaaaagacatggcgatctaaagtaagccttgaaagataaggtactaaatcaggtggatcttatgagggatgcaaagggtcttagaggagcatgagctcagaacaggctgtgtctgtgagccatgctgggatcaggagcagctgagaggaatgggaagctcaggcaaagctggagttgattta

SEQ ID NO: 3950 - DNA, 661 bp, Homo sapiens
  ANK3
  misc_feature [331]..[331]: Chromosome 10, SNP identification no. = rs6479706
  misc_feature [331]..[331]: allele = g, in linkage disequilibrium with rs12767186, respectively
  misc_feature [331]..[331]: n is a, t, c or g
gggacctctactttgtgcaggctctatgaaacatgcctcatctcatttcatctccataacaacacatgaaatagatgctattaatgtcagttcacagaggagcaaagtgaagctggaatgggttacaggtaacatggctagaaaataccagagctgaggtttgaccctgagctgtctgattcccaaagctgtgctctttcctgtgggtcacagaagagaaaatatatcctgatagtgagtctcttcctaacttgggcaaacattagctccagctctgaatccaagtagcatagtctctatacagaaaatgttgccgagaaacaatttccanccaaaaggaaacagcatattcagtgacagcaaaaatagttaatgtctaaaagagtggctagttcaactctttcattttaaataagaactcatggtttttctttatatttctttaaagatgtcactatcaaagctcaatcaaaagtagcctgctatctgttttacagtaaagaaagcccctcccagctagaaagatctatgagtagagagatatatatagcagttgaatggaaaggggcatttaaaactcaattgtggaggaatcaattacttactctactttgaggaaagttattttaacatttgaaacaatttagaatatgttgatcta

SEQ ID NO: 3951 - DNA, 661 bp, Homo sapiens
  ANK3
  misc_feature [331]..[331]: Chromosome 10, SNP identification no. = rs12767186
  misc_feature [331]..[331]: allele = a, g
  misc_feature [331]..[331]: n is a, t, c or g
gctcactgcaagctctgcctcccaggttcaagcaattctcctgcctcagcctccccagtagctgggactacaggtgcctgccaccacgcccagctaatttttttgtatttttagtagagacggagtttcaccatgttagccaggatggtctcgatctcctgaccttgtgatctgccctccttggcctcccaaagttctgggattacgggcatgagccaccgcacccggcctgcttttatattttaaactaaggggacctcactccttttagagacaagcctgccttatatttcttaccaggaaatatatatcatatgcttttgtcataagntcatcaagtttctaaatgtccagagtccatttcaaagcccgattatttagggattcaaaaatgtatttaatttatctcacaagcctggcccaggtagagaccaaatcaccagccagaacacaagaggctgctgtcaattctggttttcttgtgatgatattggattacgtcaaagcccaaacacacattgcctttgatgttacaatattatgaactacacagttttttattgtctttactgtatcttagcactagctccactagtttgtgtggctttgtacaagttatggaacttcttgcttcctagtataaaatggaaatcatatccac

SEQ ID NO: 3952 - DNA, 661 bp, Homo sapiens
  ANK3
  misc_feature [331]..[331]: Chromosome 10, SNP identification no. = rs1459731
  misc_feature [331]..[331]: allele = t, in linkage disequilibrium with rs12767186, respectively
  misc_feature [331]..[331]: n is a, t, c or g
ctagtttttgatagttactgccaaatgttctgtaaaagtgttgtaaccaacaatcaatttcaccagtattgtaggaaagttctggtttcctctccccatgaaatttttgtttttagtctcatgggcaaaagattagatcttattttgtatctgactaataaattagtatttgactataaatgaggatgagaaattttcatatatttatgtttgtttgtgtatgttttctgtgagctatctcttaatttatttagtggtttccctagaaggtataatctcaaaaactaagtgagattagatgcagtttatctactgccatcttttctgtgcnattcaggaagcacatcagcatgcaagcaagagtagtggtttataatagggataaccctgcatctgccctaattcactgtgttgttagaaataaaaaatactcaaatattgatcctttattattagcaatagatatctggtgacatgcttaagtgattccagtcttccatccagattagtttaaaaaataaacaacattacctaagacagtgccaatggcctaaataactttctatttttaaataattattctattctagacagcaaagattttttttcttcaaataccacatctatttaacacttaaaaatgtgtaatagttttggctgg

SEQ ID NO: 3953 - DNA, 661 bp, Homo sapiens
  ANK3
  misc_feature [331]..[331]: Chromosome 10, SNP identification no. = rs7894698
  misc_feature [331]..[331]: allele = a, in linkage disequilibrium with rs12767186, respectively
  misc_feature [331]..[331]: n is a, t, c or g
catcaattatctgttttaaataaacatgtaatattttcacacaaaagtatctgaactagttttgactagttcagggaggaatttatattaatctcaaatagcttcaaagcttttcaaatagcttcaaatagcttcaaagttaccacagatgtggtctttaagagcaaaaaagaaatgccgatttgcataatggtatgattcaatctaattcacagtctgttttttgtaggcctcctttctttgtgtttttttgctaaggtagtttaatgttcagaatacatatatggatacatattacatgtacatacatatgcacatatatttagtttgnatgtgtctgtgtgcctctctgaaatgtgcatcaactctcaaagaatttggattcaagcaaattaatatgcatattacatcttttcctactaaaaaaatgttgtatatatattttttctctagaataatgtatttcatatctatgaaatactatactattttaaaatcttattgcaagatataagcatcaaacaattttcaaactataattcttttattattattattttgagacagggtctcgctccattgctctgtatcaaaataataataataataaacaaatggagtgccggggtatcgtcacagctcactgcagccttaatctcct

SEQ ID NO: 3954 - DNA, 661 bp, Homo sapiens
  ANK3
  misc_feature [331]..[331]: Chromosome 10, SNP identification no. = rs7901951
  misc_feature [331]..[331]: allele = t, in linkage disequilibrium with rs12767186, respectively
  misc_feature [331]..[331]: n is a, t, c or g
agggcttaaatttcatccatgaaatttttctactcattctagttttctatggccagcctttgcacatcataaagtgctgtttttaactaagatgttaagggtatggtgaaagatttgcattgattcatatacgttactaattttcatgaaggtcagttagattagaggtgcaatataaggtcacagaggctcaatctgaaccataaccaaagtcccatacttgtactgtctaactttgtcaggatccgactttcccaccatagggaatatcagagtacccagaaagaccaaggaggcactggctaacctaaagggtcttacctttgcaaangccactagaaaaatctgttcactaaaaatactttggtagttaaaatattattggaaacagactttgcttctttataaattcagttggtattttatattataaagacagagaaggagagaagagtgggggatgtcatttgactgtgcagtttgagattttttcaatagcaaacattgttaatcattgttgatacatctaatataaagtattaaggacttaataatagaattctttataatcacaatttagtcaactcaatttctttctcagagtaggactaaatgattactggaatgttaagtactaaaagaaagagttaacttgttaaga

SEQ ID NO: 3955 - DNA, 661 bp, Homo sapiens
  ANK3
  misc_feature [331]..[331]: Chromosome 10, SNP identification no. = rs898328
  misc_feature [331]..[331]: allele = c, in linkage disequilibrium with rs12767186, respectively
  misc_feature [331]..[331]: n is a, t, c or g
cattactagccgggcattactgttattactaatgtcctgggtgaagtcacagtgccaggaaattatagggggcagttgaggaataaaaagatatctaggttgctttcaagattagtgttgattcatgttttgtttcaggctggaagtatgtgtttgggacaggttttaaagggcctgtgagcctatgccatagaagtggattggatattatggtttaaaagcaacaacgtttgaacaaatgagatatggtataaaacagcaatctattaaacagataagagtagacctattgggggcgaaactgaagataggcacacacaactctgctcantgagccctacccttgatctcagtggttctaaacttttgggcttcacagaactcaaatggaaaacccctggtgttgagggaagagcctgggcttgctatcaagcagacttgggtttcattccttgctgcttacttattagttatgtgaccttgggcaagccacttaatttttaagaaagttaggtttctgcctctgtaatgagattcctgttttgattgaatacttaagaaataaatgataatgcatgtatagtaagacatagtgcataataataatacatgtaaaatgcttagtgaggtcccaggtatatagtaggcactcatttaattg

SEQ ID NO: 3956 - DNA, 661 bp, Homo sapiens
  misc_feature [331]..[331]: Chromosome 10, SNP identification no. = rs4531352
  misc_feature [331]..[331]: allele = c, in linkage disequilibrium with rs1904723, respectively
  misc_feature [331]..[331]: n is a, t, c or g
cggtgaattagaaggtcataaaactcaggacaggaagattttcacaaagaaatgcaatcactatttttgttctctcatttcgctaaaccagtatctagagaaagagatattggctaaggatatttatttcaatttccaagaggaatttgggccttgatagttaatgagggcaaggaagactatacctggaaaccaagagattcattgaggcatttgttagtattcccttagccaagagtttttgtcaaaaaaaaaaaaaatgtcaactcagtaaaaacaagtcattaagaatttgtatcatgtaggagtggatctgtggttcacgtcactntttaaagaaccctgactagctaaggtccttatagaaggaaagaggtcaatggaacacatataaaatatcctgagagtcattatcaatttttgccttacaaccagcagagaagcaggttttataacaacaatgacttatgtaaatttatcattttatttccgcttctataacactttatataaaatgcacagatgatagtcaccatgatacatatcaggcaagaatatgacgaatgaaactaataattatgtagtagttaacaagtgccaatctgtggaagtgtgtgtgtgtgtgtgcatgtgtgctacattgttgtggaaacctttttga

SEQ ID NO: 3957 - DNA, 661 bp, Homo sapiens
  misc_feature [331]..[331]: Chromosome 10, SNP identification no. = rs10996605
  misc_feature [331]..[331]: allele = g, in linkage disequilibrium with rs1904723, respectively
  misc_feature [331]..[331]: n is a, t, c or g
agtaatgtacaaaaggtgcataaaataagagattcaagacaaaaggcaacagaaggaaatagccaagataataagtgaagagagatgacaggtaacaactgtgtaccagactggagcagaagagaaggccccaggaaaactttcctcagttagattgatttgatagaataattcatgaatgaagacattggggaaagatttagacaattgttagaatgtttagcattaaataagtgaaaaatacatcaaaaactaagcaaccttccttctctgcatccctaaaaataagataattattaactccagaggaaaaaaaaattgaagcaggaanttttttcaatggccatagtaaaatagatggttcagcttgagtaatgttttcatacttacaacatgaatactgaaatcaacaaaaatcaaaattacaatttaactagactagatatacgggaaaaagggaggctacatgtgttggggtggtttaggggcttgaaaagggttgaaaaagacctaccttctaatattctctggtaggggcagtatataatagtatataatgcttaaaacttagaaaataatcaaggagtagctaaataggtatattatttggacatatacagttaaattctagaataaacgtcaaacagagttgaaagtggta

SEQ ID NO: 3958 - DNA, 661 bp, Homo sapiens
  misc_feature [331]..[331]: Chromosome 10, SNP identification no. = rs10822609
  misc_feature [331]..[331]: allele = g, in linkage disequilibrium with rs1904723, respectively
  misc_feature [331]..[331]: n is a, t, c or g
ctttataattaaaaacatcccagaaagataatccttgtaaaaaatatgtttcttttcaagttgcagcccactaaatttagcatccataatttattattatcctctctcataatttacctatttattcaataatgtattgctatcattaaaacatgattaaatactgatagcaattaatgtattgctatcagtgtggatccatatatgcttctattattctatggattataataattactatcagcatttatcttgctattcaaaattttccgattctagccatgagtagctccttaaggttgactcatgtgtgctttcaacatgttacccnctttttctgaacatgtgcttactttctgacacaagatgctctaggctcatgttgtattttccctaaatcagccttgagttcaaccattcctccaaagacgttttatcagtcagggctctcccaagaaacggaactactaagatgtgtgtatatatgcatatagaaggatttattttaagaaattggctcacacaattatgggagctggcaagtccaaaaatctgcatggcaggcccacaggctagagacccagagaagagttcatattgcaactcaagtctgaaggcagtctgcttatagaactagccttttcctctgggaacttcagtc

SEQ ID NO: 3959 - DNA, 661 bp, Homo sapiens
  misc_feature [331]..[331]: Chromosome 10, SNP identification no. = rs1904710
  misc_feature [331]..[331]: allele = t, in linkage disequilibrium with rs1904723, respectively
  misc_feature [331]..[331]: n is a, t, c or g
agagtaatctctgggaagtacatttatatagtttccatgttctgtggaaaattctcactagatagaaaaactaatgcaaaattagtttagcaaaccagatgtcttacacaattcttgagagttatcatggcagtgtcaagcaacatgctagcactttggcttgctttttactcacaaaaataacagttttataggtactgggtgagcatcaagagaactggcaaattctagaagaggagagaacaaatctatatgctgagcaaggtcaatggcttcttcccctccatcttcccatgagggactgagcttacccaaaatctaaaatgaaagncattaactaatacttaaagattaatacagagttttaaaaaattaataggaatttaaatttaaaaattcactcttcattatgtaagtattgtcttttaatgttaaattaaaaattgacctaccaccagaaaggtaataaaaacaggaacaaaagaagctaaatgcattacagatgaataacataatcacactgaaggtagaagggaagaaaagagctaacccaaataacattggaaaaaaatattttgaccagatactctaaagctaaagacacaagaaactgtacacacatactgtcatacagttaggaaatttgtttctcataagagtg

SEQ ID NO: 3960 - DNA, 661 bp, Homo sapiens
  misc_feature [331]..[331]: Chromosome 10, SNP identification no. = rs1904708
  misc_feature [331]..[331]: allele = c, in linkage disequilibrium with rs1904723, respectively
  misc_feature [331]..[331]: n is a, t, c or g
agcaaacttaatggataaatcctgtggttgtgtgtgttttgactacttcactcaccagccattccctcatcactctccctctccttgggcctccttatttcctgtgacacaacaatattaaaattaagccaattcataatcctacaatggcctctaagttttcaagtggaaagaggagtcaccacatatctcactttaaatcaaaaactagaaaggattatgcttagcgaggaaggaaggcatgtcaaaagccaagagaggctgaaagcaaggcctcttgtaccagttagctaagttgtgaatgcaaaggaaaagttcttaaaggaagctnaaagtgctactccagtgaacacacaaatgataagaaagcagatcagccttactgctgatgtggagaaagttttagtggtctggatggaagatcaaaccagccacaacattcccttaagccaaagcctaatccagagcaaggttctaactctctctaattctatgaaggctgagagaggtgaggaagctgcagaagaaaattagcctaagataaaaatagtctttttggtcattcactgcatatcattgaattatctaatattccaacatgtttataaatgctgtcattaaatcttactttcaatatataatactttggctcttgttctct

SEQ ID NO: 3961 - DNA, 661 bp, Homo sapiens
  misc_feature [331]..[331]: Chromosome 10, SNP identification no. = rs4596964
  misc_feature [331]..[331]: allele = g, in linkage disequilibrium with rs1904723, respectively
  misc_feature [331]..[331]: n is a, t, c or g
tcaccatagcaaatataataataatgaaaacgtttgaaatattgcaagaattacaaaaatgtgacaatcagaaatgaagtgagcatgtgctgttggaaaaatagcttcctatggattggcttatttgaataattttccaggctccaaagcatagggctattcctagttgtctgaaacctggccccagagtgatttgggttggagcatagtggccacgaaggtgagagctctttaatggaaatggtgggggtatggacttcattagctgctaaaaagaactgaatcacctgtagctagagactcaacattgggtcaagataccatttagttnaaacacaaaccaaaaagctccattacagtccttatccaggtctgttaaatcagaacctgtgttttgaaaatacctccagaagatgccaatgcacgttcagatttgggaagcactgctttaaacaatgctttttcaagagcagttgaaacattacaaatgtttaattcagaaaagaagaaattttagatggatatggaaagtgagtcaaaatatatttttagggactttgggtgggtctaaatatatgagggctctcataagacatttgatcccataggaaagaataagaaatatcaattacaagttcaaaaacatagattttgttaaaat

SEQ ID NO: 3962 - DNA, 661 bp, Homo sapiens
  misc_feature [331]..[331]: Chromosome 10, SNP identification no. = rs1904720
  misc_feature [331]..[331]: allele = t, in linkage disequilibrium with rs1904723, respectively
  misc_feature [331]..[331]: n is a, t, c or g
agaagaaattttagatggatatggaaagtgagtcaaaatatatttttagggactttgggtgggtctaaatatatgagggctctcataagacatttgatcccataggaaagaataagaaatatcaattacaagttcaaaaacatagattttgttaaaataagatcctggtaaagtgactacattatttgaggatcatctttatggaagaattatataaccttattctgtttgacttagccatgaacactcaacttgttctggccaatgaaacgtgaaagaaaaagacatttgttatctccagacagaaactataagaagcaatgaatatttngccattttccctttctttgattctggaatcacagaagtatatgtcaagatagagcttccaatagcctatgtatctcaggaactaaaataaacagagtgtcttggcatactgcaatagatacatagtgtaagccataaacattttattttaaaaaactttttgggtttctttgtttgttttatgcctctgaaatttggaagttacttgttattggtgtaacataacctaaggtgacctgacagatacgtgacaatgatgatagaactttctaagatatgcagcttacaaaaatgcattttcttctgagaaataagaatgagggtctgcaac

SEQ ID NO: 3963 - DNA, 661 bp, Homo sapiens
  misc_feature [331]..[331]: Chromosome 10, SNP identification no. = rs1904722
  misc_feature [331]..[331]: allele = g, in linkage disequilibrium with rs1904723, respectively
  misc_feature [331]..[331]: n is a, t, c or g
aagtataaatatttacatttcaactattttaattgtttaagacaatttgacctttcaagaagataattttaaaaagtaactccaatctcaaatgtataattgtaaattgatatttaatttgaagacttcattaatttagaaacaatattgaagggtttatgataacttaaaatttttaaaaggtctagcatattatgattttaagagtcacaaaagtgcttgaaaaggtttgtcacccagataatggggaaagttaaaaaggatatcaagtattgcaaagtatctgattagtagagagactaaattcagatgccagcataaagtttaagtncctcacactgttatttaacttgtgttggccaatataaaccaaatttagaaaattcatctttcatgcctaatatgtgaatgaagaaaaacaaaaaaattttaaagaaaattcatccttttataagcctaactgtttgtgggaaaaagacagttaccaaaagcagtcataaaatgactgtgtgcattttcctaagtagtcatataccaattctgtttcctcataatttccagccatgcttttcagacgtataaatggcagcatatggccacataacaaagtttaagaaactaagtattatcataaatttcacagaacactagcctcttatga

SEQ ID NO: 3964 - DNA, 661 bp, Homo sapiens
  misc_feature [331]..[331]: Chromosome 10, SNP identification no. = rs4746528
  misc_feature [331]..[331]: allele = c, in linkage disequilibrium with rs1904723, respectively
  misc_feature [331]..[331]: n is a, t, c or g
cttcttttattttattttcttttttttttaaggaaagcatacagactggaagaacagccctgtatgggtccttagaagcatctatagtgcactgggcaggagtactgacactttcccatgtcttgcacacaaggtttctgtaattcattgtaatcacagttccccacatccctacttgctacaaagttctacagagatgaagcattttggttatgtctaatgctcttagaaaatgattttctaattctagaaaacacaggaaagccaccaacaaaaagactttttttttcttgaaacagtaaaaataacatggtttaaaaaatgaaagaanaaatatgggtaaactctggtcaaacaagatgtcacttactaaacagaaagatagaagaggtaaggaattgatgcctggctgggtgcggtggctcacgcctgtaatcccagcactttgggaggccaaggcgggcagatcacaaggtcaggagatcgagaccaccctggctaacacagggaaaccccgtctctactacaaatacaaaaaatcagccaggcctggtggcgagcgcctgtagtcccagctactcgggaggctgaggcaagagaatggcgtgaacctgggaggaggagcttgcagtgagcggagattgtgccactgcactccagc

SEQ ID NO: 3965 - DNA, 661 bp, Homo sapiens
  misc_feature [331]..[331]: Chromosome 10, SNP identification no. = rs7894901
  misc_feature [331]..[331]: allele = g, in linkage disequilibrium with rs1904723, respectively
  misc_feature [331]..[331]: n is a, t, c or g
agcttgcagtgagcggagattgtgccactgcactccagcctgggagacagagcgagactctgtctgaaaaaaaaaaaaaaaaaaaaaaaaaaaaaaaagaattgatgcccctaagtatgtgtgactgtgttgacttggtgcaagggaaatgtactgctgattctctctcatccttcccttttggggcttctctcttttcttttacaatccttactatctctgctctatgaatctaggtacctacgcttccctagtgggtaagatgcacacaatgtgagcaaatgtgaatcaactcactgaaagcagttgttttgagtctctcaataaaatntacgtctgttggcatctcattgaatctaggcccagttcacttctctgaaaagatagctaattagtctaagtatgatagatatagatacacgccacctgtcaggaaagaactgccatgctgcaggaatgtgatcagcagacagccatcaacattcagctcctttataatcagcctctgcttcagaaagtagccttgccagaggtcatgattttccctgggcagcccacattggataaataaaaggctgggacataaaggtacagtcatttcagctcaaaataggacaactagacaggtaatacttgctcctgatctcttccctcacattgg

SEQ ID NO: 3966 - DNA, 661 bp, Homo sapiens
  misc_feature [331]..[331]: Chromosome 10, SNP identification no. = rs1904723
  misc_feature [331]..[331]: allele = a, g
  misc_feature [331]..[331]: n is a, t, c or g
cacttttgatagtatacataattattttaaaactaaaaatgtttcaggcactgtattaaattctgtaaatttattttcaccaatttattcttggagcaatcccttatgtaactttatagataagaaaaccaaggctcaaaaaaggtagatagatagatgatagatagatagagagatggatagatagacagatagataaaatgaagatgcaaagcaaaagcacaagtcaaaatatcaaaagcctatgaccctaactttctgagtaaaaagcaaaggtgaaatttgggaaggggaaatagtataggttctatcattagtgttcatcctatcnctggcagatccagaattttggagcagagactcagcagaaaaaaagaagaggaaaggttagaggcctgagattatttcaggactgattctttttggggggaattgccttaaccaatgtcaaatgctgcaggaaaattttgtatgaagtttgacataaaacgctataaataaaatattttaacttgagttccctgtttagaaagtagaactttaagaatatattaaaaatcaatatattcctaccaagggttttgatagcaactgactaaaaacacgaataaaagctcagcattatcacatatttattgagtctcaacactagacaatacca

SEQ ID NO: 3967 - DNA, 661 bp, Homo sapiens
  misc_feature [331]..[331]: Chromosome 10, SNP identification no. = rs10762003
  misc_feature [331]..[331]: allele = c, in linkage disequilibrium with rs1904723, respectively
  misc_feature [331]..[331]: n is a, t, c or g
tgtacattttaggatgacagccgactgtcagtgataacacttttagattgacataggaggaaaaattggcattctgaccattaatagagtgggaacacacttaaggtaggcagaaataaatgctgcagtagaatgtgttctaaaattctacttacaaaaaaaatcattatggctcaaataactccattagtttccagaggatgtttaatattctatcagggactgagctttcacaaggttgaagctttagttgcctaccattatctttatcatagtattgtatggtcacgcccaattgaatgtaggtacacagatatttcaaatgggggcnttcagggcactagaaaactcttaatgaactgttccatgaatgccttttcaataaatagatatagaagatactattcaaaagttgaagcttaattcattgatctcatttattaggtagatgtggagaactgagaaaatgggaatactatgtggtcttgctcattccccttcaactatatcacattgacatatccaactcccttgatttttaaggctgagtttaagttggtggtcttctgagaaagttaattgaaatgtcactttttgtatagaccagaccaataccctacatactggctttcgttctgcaggataatttagtatgtaaata

SEQ ID NO: 3968 - DNA, 661 bp, Homo sapiens
  misc_feature [331]..[331]: Chromosome 10, SNP identification no. = rs4333907
  misc_feature [331]..[331]: allele = a, in linkage disequilibrium with rs1904723, respectively
  misc_feature [331]..[331]: n is a, t, c or g
tatatgtatacatttatatctccagtatctatctcaaagtaaatgtaaaaaagtttgctgaatgtaagaataaaataatataaaacacgtattaattagaattactcccacttagtggagtgaactgttccatggcttctgatagtcctgatgttctgatgttcctgttggcttctgacagtccctctgatgtgtctcaaggtgtgcctcacacagcctctcggtaagcagggctagcttataagtaaataaactgcaagtgaaggggcagtaactattccccctctcttcctttctctctttctctccccctccctttctcttttgttcntagactcacactcactgtgaattatacattttccaatgttgccttgaaacaatcttaccttttgtaattttctctacccagactcctaatataagcctcagatctaagatattgaattttcgattcatcacagtggactggtgattccccgtgttccttgtcttgattgactaattcctgagaactggctgattgagccccacccaggctgtctaatcctagccagatctgcttaaattctcttattaacatgataaacaaggatttttcttaaattttgtgcattgtctttatgccaaggaatatctagaaattgggccaactacatat

SEQ ID NO: 3969 - DNA, 661 bp, Homo sapiens
  misc_feature [331]..[331]: Chromosome 10, SNP identification no. = rs7067834
  misc_feature [331]..[331]: allele = t, in linkage disequilibrium with rs1904723, respectively
  misc_feature [331]..[331]: n is a, t, c or g
tagtggagtgaactgttccatggcttctgatagtcctgatgttctgatgttcctgttggcttctgacagtccctctgatgtgtctcaaggtgtgcctcacacagcctctcggtaagcagggctagcttataagtaaataaactgcaagtgaaggggcagtaactattccccctctcttcctttctctctttctctccccctccctttctcttttgttcatagactcacactcactgtgaattatacattttccaatgttgccttgaaacaatcttaccttttgtaattttctctacccagactcctaatataagcctcagatctaagatantgaattttcgattcatcacagtggactggtgattccccgtgttccttgtcttgattgactaattcctgagaactggctgattgagccccacccaggctgtctaatcctagccagatctgcttaaattctcttattaacatgataaacaaggatttttcttaaattttgtgcattgtctttatgccaaggaatatctagaaattgggccaactacatatgttgtcttcaagaaaagcttaccaatcgctttagggaatcaaaatgtataggtacacttctccattgtgaccttgtttcccatgttttttcagagagaaatatttactttgc

SEQ ID NO: 3970 - DNA, 661 bp, Homo sapiens
  misc_feature [331]..[331]: Chromosome 10, SNP identification no. = rs4384295
  misc_feature [331]..[331]: allele = a, in linkage disequilibrium with rs1904723, respectively
  misc_feature [331]..[331]: n is a, t, c or g
tgatgagctaggaagctatatcttaatagatctcatgatagacagacataataaacatttatttaaattgatgttgcaaaggcaaaataaatgtcatttttaaaaaattacgagatgaccttttgaaacaaggctaatgctctcataccaaaatgtataagtgatatagaaaacattacttttcatttgtcatgatctgcaaccacacacatgacatttctatttgaaaaggtcaggagggatgacgtgattgcttaccaagattaacactacaatttaaattagatattttacgagtgtattattgaaatttttttaatgatcactgggnaaaattgattaatacatcagaaaatttcccattctaaaattatcatggccatgtgcaatcatctaaaatagaaggtggtaaaatgtttggtctcagaatttttcttctgggtgctatcttgagcttgcataaaaatatttctgaccccgcttccacagaacatatatggcccatgctttagttgtgcaccttaacttttaaaatatgacaaattcatcttctgatctgttgattgtcaaaaatatatggagttgagatgggcaaactttattcttaaggcaccaattagtatatgttttagatttcataggttactcaactctgcagtta

SEQ ID NO: 3971 - DNA, 661 bp, Homo sapiens
  misc_feature [331]..[331]: Chromosome 10, SNP identification no. = rs10822614
  misc_feature [331]..[331]: allele = t, in linkage disequilibrium with rs1904723, respectively
  misc_feature [331]..[331]: n is a, t, c or g
aaaattacttttagtttaatttgtgaggtagtgatttgttttttaatgatttaaaacattattttagtgttttttggttgtttctttttacaattgggaagtattcatattagttctttaaaaaattgtgttacctcacaatatatatgatttaaatctttgcctttacgaaaggtttgaggttaagataaaatggagaaaggtgagatgacattgttgtcatcacactctttataaaaacttcacaggtagaagggaaactgtacgcgcctgtaaaagatctcacaattagcacttgcacactataatgttgttggacatttaatgcaantttcagacaccttttccactgctgcctccaagtgaaaacaattgtatcaatactaaaagtaatataaattaaagtacactcagtaatatgtatatacatttttcttttcttaattcaattctcaaacttttaattgctataataatttcaaacaggcttacttcatatggtaactcttttgttaacaattttttatcaaaataattcctgtaaagatataccacttttagagagaaactcttcttaaaattttataatggcattttttgcaaaagacactgaagagtacagtgtaaaatatgacattcaattaaaagttcaggttataat

SEQ ID NO: 3972 - DNA, 661 bp, Homo sapiens
  misc_feature [331]..[331]: Chromosome 10, SNP identification no. = rs10822615
  misc_feature [331]..[331]: allele = g, in linkage disequilibrium with rs1904723, respectively
  misc_feature [331]..[331]: n is a, t, c or g
gaaaggtttgaggttaagataaaatggagaaaggtgagatgacattgttgtcatcacactctttataaaaacttcacaggtagaagggaaactgtacgcgcctgtaaaagatctcacaattagcacttgcacactataatgttgttggacatttaatgcaattttcagacaccttttccactgctgcctccaagtgaaaacaattgtatcaatactaaaagtaatataaattaaagtacactcagtaatatgtatatacatttttcttttcttaattcaattctcaaacttttaattgctataataatttcaaacaggcttacttcatatngtaactcttttgttaacaattttttatcaaaataattcctgtaaagatataccacttttagagagaaactcttcttaaaattttataatggcattttttgcaaaagacactgaagagtacagtgtaaaatatgacattcaattaaaagttcaggttataatagattcacactttttaggaacacaatccacttcattcagagattattatatggaactaatgtaaagtacatgccatatttggatgaatccacaacaatatgctttgcatacttaatcaaggatgtgggataaacaaggattatcttccttaacttcagtttcttgcaca

SEQ ID NO: 3973 - DNA, 661 bp, Homo sapiens
  misc_feature [331]..[331]: Chromosome 10, SNP identification no. = rs4548520
  misc_feature [331]..[331]: allele = g, in linkage disequilibrium with rs1904723, respectively
  misc_feature [331]..[331]: n is a, t, c or g
taattccagcactttgggaggccaaggtgggcggatcacttgagatcaggagttcgagactagcctggccaacatagtgaaaccctgtctctactaaaaatacaaaaattagccaggtgtggtggcacatgactgtaatcccagctacgtgggaggccgagacaggagaatcacttgaacctgggaggcagagtttgcagtgagcagaaatcgggccactgcactccagcctcggtgacagagcaagactctgtatcaaaaaaaaataaaataaaataaataaataactaaataaataaattgaaggagaatataatatattgcatttttnttaaggtcggccaaatattcccagttagttttaagttcttagaatgtagaaattatgtctcatatgccttctatatgacatagtattatgctggatacctggtatattgatggaatggttaaactttctcagggaacagctgattatgctttcctatggcacttattccttgaagatttttatttcgaaaaaacaatttctctgagaatgctcctttataataaagagttgctgggaattacagtaatagaaataaggtggagaaagcacacaatgtgtgctcagaggacatgagtataagttctgccactgtggttactagtagtttca

SEQ ID NO: 3974 - DNA, 661 bp, Homo sapiens
  misc_feature [331]..[331]: Chromosome 10, SNP identification no. = rs7920677
  misc_feature [331]..[331]: allele = a, in linkage disequilibrium with rs1904723, respectively
  misc_feature [331]..[331]: n is a, t, c or g
ttataatactgtaaaaatattgcaattttagcattaaaatattaaataattttaaatagcaaaaagaataaaataattatgtttaataatcaagaatgaaagggtgttttaatattatgaaatatattaatataatgaattatattaaagaaatacagggataagcatattgctatttccatggtgtctatctatcattatgtatcaaactacttcaaaacttacaaaacaaccaatttattatctcatgattgtgtgggtcagaaatatagtgcaggactttgttggagaatatatcaattcttcatatcattgactatgatcactcagngtattcatctcatatctgggctggtctggaagatattatgacaatttcactcatataactggtatattgccataaagaagattgacagcgaatcacccgggtgccattcatttcctgtacctctctaggcattctccccaggaaagtaactacattttcttcactgtggcttagaactgccatcctctaaaatactaagcctagaaactgataaaacattatttctattgtaatcaattagccaaagcagtcatataatagtttaggttcaaaggaagggagcttagaccccacgtcattaaagaaaaccaaatatttgtcatcattttt

SEQ ID NO: 3975 - DNA, 661 bp, Homo sapiens
  misc_feature [331]..[331]: Chromosome 10, SNP identification no. = rs9633568
  misc_feature [331]..[331]: allele = c, in linkage disequilibrium with rs1904723, respectively
  misc_feature [331]..[331]: n is a, t, c or g
tcatgcccaaatgttgcattttccaagaccaccctgcttgccatgcccccatcctgtgcctatggaaaccccaagaccctagcgggcagagacatgagcagctggacatccagaggaacacatcaactaaagaagacacaaggggctggatgtcagagcatgttagcagaagagcacaccaacaggcccgaaggccatcgactggtggaatgatgcatactttgaccagggtggtcagacgagagttcgtgctgctgagcggcccaactccaggggaaaaccatctcccttctggctgccccatctgctgagagctactgtcactcaatanaactttgaactcattctccaagcccatgtgtgatctgattcttctggtacaccaaggcaagaaaccctgggatacagaaagccttgtccttgtgataagacaggtggtctaatcgagctgactaacacaagccaactatgggtggctaaactaaaagagtaccctataacacacgctcactggggcttcagaagctataattcacccctgcacgcccccatggggtcagagccccacagccttacccatttgcatgctccacgcagaggtttgagccacagggcactgaagaagtaagccagacccccactgcatgctctatgaggggga

SEQ ID NO: 3976 - DNA, 661 bp, Homo sapiens
  misc_feature [331]..[331]: Chromosome 10, SNP identification no. = rs7910336
  misc_feature [331]..[331]: allele = a, in linkage disequilibrium with rs1904723, respectively
  misc_feature [331]..[331]: n is a, t, c or g
taaaattattaattattatacctgcatcttatttttggtcagatataatgctacagtctgaaagtttgccttcccctctcccaaattcatatgaaattttaatccttgaggtgatggtggcattaggagattgggccttttgagagctggagggtagaggccttagaatgaaattagtgcccttataaaagagacacccgagaactgacgtgcccttccacctttttgagggcagtgaaaagactccatttatgaaacaggaaatgagccctcatcagacactgaatctgccggcacattgatcttcgacttctgccttcagaaccatganaggtaaatttctgttgtttataagccagccagtccatggtactttgttgtagacacccaaacaatctaagacagatgagtatatcacttttttttccaaaatcgtttcctaattttcggaaagttttcaatatttcttgtatttaattaatttggaatatatatatatatatactgccatccttttattctatcaattcttacaccgttgatttctaaatcatttacttatctatcaatgtttgtactaatacaacattgtttttcaatatatacaaaaagcaaatatctttacaattctatttgaaaaagatttctagatttcaatatt

SEQ ID NO: 3977 - DNA, 661 bp, Homo sapiens
  misc_feature [331]..[331]: Chromosome 10, SNP identification no. = rs4370819
  misc_feature [331]..[331]: allele = c, in linkage disequilibrium with rs1904723, respectively
  misc_feature [331]..[331]: n is a, t, c or g
tgaatcatatggcccaagaggtagagcagcttgcacagcagtctggacctgttgcagagccttctgctgttctgggctccactcaaaactagcagcttttcaggtcacttggcactgtcacactcggaaataatgtataataggcaaaacaagaaaaaatgtttagccaaatatcttggcatcagtgacacaggccacttcacatgtaaaattagctgacacaattgtgctgaattaaaatggcttaattggaataggaatgataagagtgttaactaactcatagctctatgtgtcttttgaatatagctgtctatctttatatccatcnaccaatttatctatctaagagataacatacgtgtaaaactaacattgtgaatcatgactcagttgaataagaacactacaaataactttaaaaactcaaatgcctttgaaaccttctgtcttcccttcaataacaaacttctaaattttgtttttatcattctcctgttttcaaaatagttttactgaaaataaatgtgttttgaataggatactgttatactttgtatgttttcaattttatattaatgatatactacatgaattattctcatgtgcctttttcactcaaaattgtttcttgacatttatccatgttattttacacagt

SEQ ID NO: 3978 - DNA, 661 bp, Homo sapiens
  misc_feature [331]..[331]: Chromosome 10, SNP identification no. = rs4746529
  misc_feature [331]..[331]: allele = g, in linkage disequilibrium with rs1904723, respectively
  misc_feature [331]..[331]: n is a, t, c or g
tattggccaggctggtcttgaactcttgaccttgtgatccacccatcttggcctcccaaagtgctgggattacaggtgtgggccaccgtgactggccaacattatgtattttaaaagatgtcttcaaatagaaacacacataaaataaggccatttatgaatcagttgaaaataaatataaaatctggttatatgaaaatataaccagagctctcagggccctaaccctgtgtttcccttaggaacaatggtttagtatttgcaaattcagtgtttgcagcaactttatatttcctaactaccatgaataataaaaaatgactctaaatanaatcatgtgtcacttaacaatgaggttactttctgagaaatatgtccttaggtgatttcatcactgggtaaacatcacagagtgcacttacacaagcctagatggtatggcctcctacacacctaggctatgtggtataacctattacttctaggctgcaaacctgtacagcatgttactctacttcacactgtaggcaattgtaacaaaatagtatttgtagtatccaaacatatctaaacatggaaaacacacagtagaaataaaatattataatcctatggaaccactgtcatatacgctgtccattgttaactgaaacaccttcat

SEQ ID NO: 3979 - DNA, 661 bp, Homo sapiens
  misc_feature [331]..[331]: Chromosome 10, SNP identification no. = rs9651307
  misc_feature [331]..[331]: allele = t, in linkage disequilibrium with rs1904723, respectively
  misc_feature [331]..[331]: n is a, t, c or g
ttttctttcattcggttaatacgatgtataccattgattgattttcacatgtttaaccactcttgcattcctggataaacctcattttttcgtggtgaacaattctctaaatatgctatggattcagtttgctagtgttatgttgaagatttctgcatctatcttcataaaggatattggtctattgttttctttcttttgtgctatcttttcctgactttgttatcagtaatgctgatcttatagaatgagtcaggaaatgcttttactttttttttaatttgttggaagaatttgaaaagcattattgtcaaatcttttaaatatctcnagtataattcactagtgaaacaatctggctcatttctttgtcgggaggttttttattaatgaattattctctttactctttataagtctgctcaaatttccaatttacttgtgaaatagttttgaaaatctgtatgttgtcaggaatttatccattttgtctagtttttctaatttgttgccatacaattgttcattgtattttctcaaaattctttttatttttgtaaattcagtagtaatattttctctttcatttttgttttacttattagtgtcttatttgtagccagtctagctaaatgtttgtcaattttattgatcatttttt

SEQ ID NO: 3980 - DNA, 661 bp, Homo sapiens
  misc_feature [331]..[331]: Chromosome 10, SNP identification no. = rs10762012
  misc_feature [331]..[331]: allele = c, in linkage disequilibrium with rs1904723, respectively
  misc_feature [331]..[331]: n is a, t, c or g
tcctgcctcagcctcccgagtagctgggattacaggcgtgcaccaccatgcccagctaattttcatatttttagtagagacagggtttcaccatgttggccaggatggtcttgatctcttgacctcccgcccgccttggcctcccaaagtgctgggattacaggcatgagccactacacccagactatttttaacttttaattccatttttccatgaactttttggagtcccctcttatttactagaaagatacaatgctgttttaacacatttaggagtctcagtaacataacctacaaggatagtttacataaataaaacagtatgggnatttttccagaatctaatagaattttcaaggtattaatgagttcaagaagcttagaaggttatgtgtacatctgtggggggcatctggaatcatgcatatgtgcgatttggaaagttgagtaatataccagaacgagaagactttatacactgcaactttttaaaaaatatttttattgtatatatttaagatgcacaatatgatgtatgtgtgtgtgtgtgtgtgtgttgtgtgcatgattactacagtcaagcaaattaacatacctattatcttacctagttactttttctgtcttttcttttcctgtggtaagaacacctaaaatc

SEQ ID NO: 3981 - DNA, 661 bp, Homo sapiens
  C10orf11
  misc_feature [331]..[331]: Chromosome 10, SNP identification no. = rs7920191
  misc_feature [331]..[331]: allele = t, in linkage disequilibrium with rs7101216, respectively
  misc_feature [331]..[331]: n is a, t, c or g
acaagtgaaccctgggctgctggcccacccattattgtcactcatctgtgggctgatacccccttcactttgctcaagctcccagcttggccattggtgctcctccatcctgcagtcctaccccttagcctgccacagcccttgacttttcaggcccaccttcagccaggcctcactctcctacttctggccaggctgttgcccaaattgccatctccagtgggtagaagactatttatagctcccactgcaaattggttcggagactgaacgctggtctcctgaaatagacctttagtgtggacagagctcatggcaaaccttcttgggngtagggtactcagctctgtccccctctccctagaggatgtgcacatggctaatgctacaggagtgggggtgggttctaagaaatacccagaaccactgttcactcctaccctcaggtccttttgctaaaccaggcttgtttgtggatcttccttccctaggagtgggcctcttctcagtgtggggttccacagttctgctctttaccagtggggttctgtttctcacctttccccagcacccacacttgtatatacctacacacacaccccttccactgccatgccttccaatggtctgggaagtgttttagtgggaaatagtctaaagt

SEQ ID NO: 3982 - DNA, 661 bp, Homo sapiens
  C10orf11
  misc_feature [331]..[331]: Chromosome 10, SNP identification no. = rs4746364
  misc_feature [331]..[331]: allele = t, in linkage disequilibrium with rs7101216, respectively
  misc_feature [331]..[331]: n is a, t, c or g
ccgttgacagggcacttgacactttatatcatagtagttttgtgaacttgtcagctaccaaggatctatacgacaaacagctatactgtcagcccagctactgtgcttagaacatgataggtatgtactaaacatttgttgaaaggttgagtgaatgaatatatatggctgatgatggttaatgttccttaagcatttaaaaatgtgtagactctaatttacctccagtacaacaattcaagatgcaaatcttgaatgcaccattcagtgtgatcatgacagtgcctttcacttagtaagtcttccacttgtgaggttggttaagaggagngtgaggttagatttgcaaacataaaaacctctggggtagggaggtcttttggtcactctctatgatcctggaacatcacgtgctctttatttatacttctggacttcaccaaaatagaggtggtgattttggagcccaagaagcaggaaggcagggtgagagcagacctgtgcttgagagatgtctgcttttcagaggagatggtgtagtgacaacttcagggactgatgcctggctattaggatcgagtcttcttagatgtcagctcatttccttgtagaaaatgaaatctaatgaaagctggtttatctggtattccatcaagcagaa

SEQ ID NO: 3983 - DNA, 661 bp, Homo sapiens
  C10orf11
  misc_feature [331]..[331]: Chromosome 10, SNP identification no. = rs12355465
  misc_feature [331]..[331]: allele = a, in linkage disequilibrium with rs7101216, respectively
  misc_feature [331]..[331]: n is a, t, c or g
gcctgcggcactgaagtacactttgtcaaccgctcatcatttatacatcttatctctgccagaacaaaagataggacaacctcacactgaagttggggatgggaaggggggagatgaggatgggggtgagggaggcaagtcaggcaaagttgttgggtgcccacagggacgagcttgggtggtgaggcccctgctgttgcctcagaactgtctggtcagtcagctctgccacaggccctggctttgccaaagctctttgactgtcctcacctcccccacccccaacaaagtccaggaacagagaactgcatgctgttttaattacagcatnatctcagagagctttcgaggcactgcagccactctgcagctgaccctttgctttaatcaaccactcctaaggcagggtttgtaaccatccctgacaaagatgaatcacggcccgtggatccagtttctgagagaatttcggggggagctgcccaggcagcagcggctgttggggccagcttttgggaaattggggcatctgatgatggtgagacttggcggtgatattcatggttttatttcaagccatgttcccaaggccggaatgagacccaaatgtttttgttcagattgagatggaaggttggtggtgatgctgactccttgtttg

SEQ ID NO: 3984 - DNA, 661 bp, Homo sapiens
  C10orf11
  misc_feature [331]..[331]: Chromosome 10, SNP identification no. = rs7101216
  misc_feature [331]..[331]: allele = a, t
  misc_feature [331]..[331]: n is a, t, c or g
ccttccttcctgaaccgtttcaaagacagacagagaacattagacttcacagcaattaaactcactgtagtgtacatttactaaaaggactggaaatctttttttcagccagccccacagtaacagagctgttagaaaatttaaaaagaaaaatcctgaatgatgctgttagtagataaattaagtgatcttgcaagacccttctcatttattatattaatacttcaactacatcatatttagttaaaaattttttgcatattatcctacaatttaacctgtttagtaatttttttttcacaaaccccttttaatttaccaccttcctctncacacgcacagacgcacatgcttacttactctggtttcaaatattatgcataaactgatgttttgatttggtagccataatttctaagtctgttgatagaaacttgtcaatcatttccaaggcaatatgttgccatctaactgttttgatatatgtgaagctcttgtggtttgtctagttcttataaaaatactgcgtatcccctttgatccttcgtgtactttcaaaacttgatactggtggggaacttgactcttcagtttcttttgaacttgttttagaattatgacagtgtttttctagtacagaaaagtagacacacctagggga

SEQ ID NO: 3985 - DNA, 661 bp, Homo sapiens
  C10orf11
  misc_feature [331]..[331]: Chromosome 10, SNP identification no. = rs1898106
  misc_feature [331]..[331]: allele = t, in linkage disequilibrium with rs7101216, respectively
  misc_feature [331]..[331]: n is a, t, c or g
acaaacttgacatacatatctaaattcatttgttctataacaatcagtatgttaattacacatgatctttaactagacattaaaagaggttctcaactgaagggcactgcgccagctactagtatgtattaccaggtgtatttcaaagtattaattaaaactgtgctttgaaaataatcttttagtaatccattgctgccaaaaagggttataggagaggaaaaatcattttctctccacccttcatgttcttagttggaatggacccccataacaaaagacagattaacagagaagaacaaatagaagcttattaacatgtgtgatatangagcaaagagaatttttccctcctcttctgaaagtttgagcctgctgaaagaaactgataatagattagcagaaaaggtatacacatttaataatgtgctggtgtgcatgggagccatacaaaatacaagactcaaagaaggaccagatggttcaagcttaaatactgccctcttcttaggggagagggagatgggggaatgtaggcaattttgaaaagagtatgatttttaggagagttggttggactcaaagaataatttgtaaataggcaatagtttctaaataattctttttggaaactgaatgggaccaaagaacagcaaacagc

SEQ ID NO: 3986 - DNA, 661 bp, Homo sapiens
  C10orf11
  misc_feature [331]..[331]: Chromosome 10, SNP identification no. = rs7077442
  misc_feature [331]..[331]: allele = a, in linkage disequilibrium with rs7101216, respectively
  misc_feature [331]..[331]: n is a, t, c or g
acatactagtagctggcgcagtgcccttcagttgagaacctcttttaatgtctagttaaagatcatgtgtaattaacatactgattgttatagaacaaatgaatttagatatgtatgtcaagtttgtacacctaagtaggttaagtactcccacctgatgtgtctcatgctattaatttgctgagtaaacactatttttatagttgaaagatcagttccattccagccattccaaattagttttgttcaaactaatgagaccttattaaattcgaaaggtgatctagattggggattatagtcttgtcacaaatctctctgaaattggacntatatccagctttcaagccccttggtccatcagccccaaagcgtaattccttctaaggtttgcaaaccatagagttttacctgtacctttggtttttgctttttatcatcaacttgacttcaacataactgtcctcctagttattttctgtctcgttttaattgttttgtgcagaactttagtttctttgtcttttctaacttccactggatatcctgtttgaatcgtggatgcatttacatgttgcccccttacctagattctactcttgactcataatactgccccacttgggctagttttgggagaagcccttatctcaacttttca

SEQ ID NO: 3987 - DNA, 661 bp, Homo sapiens
  C10orf11
  misc_feature [331]..[331]: Chromosome 10, SNP identification no. = rs7913479
  misc_feature [331]..[331]: allele = c, in linkage disequilibrium with rs7101216, respectively
  misc_feature [331]..[331]: n is a, t, c or g
cttttcggccatcttggctcctccgttattatctttactgttgcttattttgaacaggcctacaagcatctcctggtgcacatgacctagagtttctcttggaatagagtcgctgagtctttagttatgcatacttttaactttactagaaaataccaatctgttttccaaacagttgttctagtttaacattcccaccagcaaaatagtagagtttctgtgtatatacattttctccagcacttcttattgtccaatttattatttttgaggacaattaagtgggtgtaaagtggtatcccctagaattttggtttgaatgttcatcttnccttaggtgatttttccagaactggaattctgtatctcctttgcactaacaaagcagtagattactgtaaagctataaaacacaaattaaataatatgatcatctgtaatgcagcagtcaaggagtgattaggatgtgctgtgaggacggaagagaagtcattcttacagtgcagtagaaaaagccttggtcttgaatcaggagagtcagtgcctggtcctagctctgtaagtgattggctgagtgactcacatgaaaacctcatttttcagtgtttccatttcctcatctgttatttaagggtgttgatcacagagagtatgctctggt

SEQ ID NO: 3988 - DNA, 661 bp, Homo sapiens
  LOC387700
  misc_feature [331]..[331]: Chromosome 10, SNP identification no. = rs11593758
  misc_feature [331]..[331]: allele = t, in linkage disequilibrium with rs3740029, respectively
  misc_feature [331]..[331]: n is a, t, c or g
tcgctccctcccttccttcatttgtctcagctctgttgcccaggctggagtgcagtgtgtgtgcagtggtgtgatcactgcagccttgacctcccgggctcaagcgattcgcctaccccctacctcagcctctccaatagctggaaccacaggagtgcaccatcatgtccagctagagacaaggtcttcctatgttacccaggctggtctccaactcctgggcacaagtaatcctctcgtctcagcctcccaaagtgctgggattataggcataagtcactatctcatatatatccctcaaattcctcaacatattaatatctctaacccncttaccattcatcattcacaccagcacctttctctggtactgcagccaaaaccctcctaatcttcctgaattcacaccaggctaccttcagtacattctacacccaatgttctagaacaccaatcagatcctaatgcttcatactttttaacctgacttaggagactgcatgagctagcccttcttagtgtgcctcctttctgcgcatctgttgggctcttcacttcagcaatactgaacttctgcttgcctcttttaacacatcacccatgattttttttttaatatctttgagccttcacttttttttttcttttctagcatgctctc

SEQ ID NO: 3989 - DNA, 661 bp, Homo sapiens
  LOC387700
  misc_feature [331]..[331]: Chromosome 10, SNP identification no. = rs11203135
  misc_feature [331]..[331]: allele = t, in linkage disequilibrium with rs3740029, respectively
  misc_feature [331]..[331]: n is a, t, c or g
ctgggcacaagtaatcctctcgtctcagcctcccaaagtgctgggattataggcataagtcactatctcatatatatccctcaaattcctcaacatattaatatctctaacccccttaccattcatcattcacaccagcacctttctctggtactgcagccaaaaccctcctaatcttcctgaattcacaccaggctaccttcagtacattctacacccaatgttctagaacaccaatcagatcctaatgcttcatactttttaacctgacttaggagactgcatgagctagcccttcttagtgtgcctcctttctgcgcatctgttgggntcttcacttcagcaatactgaacttctgcttgcctcttttaacacatcacccatgattttttttttaatatctttgagccttcacttttttttttcttttctagcatgctctcccaacctcccacattctttagtctcaagataaccttcctccaggaaggtttccctgaccactcaagtctctcttgattccactcttacgtgtttcaactacatgctggacatttatcacactgtgtggcaatttcctttgcatttgtttatattcttcactagactgttaccctgtgacagaaaagaccatgtctgtcttatctcacactgaatccc

SEQ ID NO: 3990 - DNA, 661 bp, Homo sapiens
  LOC387700
  misc_feature [331]..[331]: Chromosome 10, SNP identification no. = rs11203136
  misc_feature [331]..[331]: allele = c, in linkage disequilibrium with rs3740029, respectively
  misc_feature [331]..[331]: n is a, t, c or g
ctgggattataggcataagtcactatctcatatatatccctcaaattcctcaacatattaatatctctaacccccttaccattcatcattcacaccagcacctttctctggtactgcagccaaaaccctcctaatcttcctgaattcacaccaggctaccttcagtacattctacacccaatgttctagaacaccaatcagatcctaatgcttcatactttttaacctgacttaggagactgcatgagctagcccttcttagtgtgcctcctttctgcgcatctgttgggctcttcacttcagcaatactgaacttctgcttgcctctttnaacacatcacccatgattttttttttaatatctttgagccttcacttttttttttcttttctagcatgctctcccaacctcccacattctttagtctcaagataaccttcctccaggaaggtttccctgaccactcaagtctctcttgattccactcttacgtgtttcaactacatgctggacatttatcacactgtgtggcaatttcctttgcatttgtttatattcttcactagactgttaccctgtgacagaaaagaccatgtctgtcttatctcacactgaatcccaaatatctagtatagtacctgtcatatacttggtgttcat

SEQ ID NO: 3991 - DNA, 661 bp, Homo sapiens
  LOC387700
  misc_feature [331]..[331]: Chromosome 10, SNP identification no. = rs11594380
  misc_feature [331]..[331]: allele = a, in linkage disequilibrium with rs3740029, respectively
  misc_feature [331]..[331]: n is a, t, c or g
aaattgttttggggaacttagtagtgtaaccatgtctgtcccttgtcactttttttaaaggttactttgatttctgcttgctggttttcttagatgacttaatcagtcatatgaatcaaactttagatatacagaaatcaaaattaatacctgaaattcttgtctaaacatgtaagcaggcttaacaaaggcaaactttctaataaccacatacaggcttctgaatgattgtgactttcatgaaatatgggaagaatattttatcacttatctgttctcaaaggggaaaagcaccacagaactttttgagtagtagtttcatgatgtatgnctctgaacacaggcatgatattaaataaatgaaattttattgggagcatgtgtgcatctcactccagaaattatttttattattttggttgttctttggaatattttacagtgaagcagggtcctgatccctggttctcaccctaggtaactgaggtttttgataaagcttcttaatccctcagggcctcagtttctttatctctaaaattagcattttggtaaacatgactgcatcagtcagaatgggctggattatgctgcagtagcaaacaactcctaacaactttcagtgttcataggctctgttcataagaatgtggaaacaaag

SEQ ID NO: 3992 - DNA, 661 bp, Homo sapiens
  LOC387700
  misc_feature [331]..[331]: Chromosome 10, SNP identification no. = rs3740029
  misc_feature [331]..[331]: allele = g, t
  misc_feature [331]..[331]: n is a, t, c or g
tttacagtgaagcagggtcctgatccctggttctcaccctaggtaactgaggtttttgataaagcttcttaatccctcagggcctcagtttctttatctctaaaattagcattttggtaaacatgactgcatcagtcagaatgggctggattatgctgcagtagcaaacaactcctaacaactttcagtgttcataggctctgttcataagaatgtggaaacaaagtatcaccaagtgtcatctgtgacgaaatgacattctcaaaaataccttctctcagaggccagtatgactgctgtctcaatcttgccactctgctgtaaaattttnctctgtctcctatacagtgagtgctgccaacatctggcatactagaattgatctactgggcactgcagcctagtggctaaaagtcctgccacttactaaccatgggaccttggacatgttcttcaactgctgtgtgttatgaggattaaatgatttaatccataaaaaatgcttgaagaatgccaacatgcacaatgtaagtgctcagttaaagttagcaattattataagaattcaactattgttaagagagttcaaaagaactctacaatcccataggattctagacatatattgcacctaagttaatttggacccagtagacttaga

SEQ ID NO: 3993 - DNA, 661 bp, Homo sapiens
  LOC387700
  misc_feature [331]..[331]: Chromosome 10, SNP identification no. = rs17387244
  misc_feature [331]..[331]: allele = c, in linkage disequilibrium with rs3740029, respectively
  misc_feature [331]..[331]: n is a, t, c or g
aatattcagactgtaatgctattgtaatttgtttagtggaaactgagagcagcagtataaacatatttaccccaagtctgattgtgattgtggtgttctgagttatcctaaagatggagaagggcctggaaaactctgtagaacatccattgtgtccctgaggatcaataatgaaagatgttagcatgtgtggatgtcctgggttctgcctgggcggtttgtttatttatttgtagataggagcataacatagatgttctttttcagacagagggattggcaaattttttcttctttaaagaaccagcatccatttactgttgataaaganaaaattgtttatagtgctgccaaatctaagtagctgttatgtagaatctcctccagtatcatcgccaattgaatccaatatgcgttagcccatatacctctggccaaacgaggcaggggttttcagtcaaacatgttagactggtcaagtgataacacaaaattgggcatctatgagtttcatgctcttcatggttcttccacagacagaagtatgagaatttgacctttgggtctatttacctgtctgaaaaataacaggattaggcactttggagctatctacttacttcttttttggtgtacagaggacttaagagttaagctccct

SEQ ID NO: 3994 - DNA, 661 bp, Homo sapiens
  misc_feature [331]..[331]: Chromosome 10, SNP identification no. = rs17129607
  misc_feature [331]..[331]: allele = c, in linkage disequilibrium with rs11186048, respectively
  misc_feature [331]..[331]: n is a, t, c or g
taagccataagcttttaagcatataaaccatagatattcaaacaaactcagtaggcaaaataaaagaaggcggaagtgaaacacaggagaaacataattttatagtgctggtgattttgctgcctgctgcagtcagcaagtgtgtgccctggagaaagaatgaatgggaggtgtgaatctgcttttccctgattccctgagtgcatcttatagcgtgagcatgtcactgtgtgaaggtgattcaagtgttcagggttttgcataccacatacagtgtggcctctaaacatcaaccagccatttcaactggaccttgactgcagaatcagtnatttgttcctttagacttattaagatatggtatatcaacaaggtagtgcctttccaagggatttttaaggataatttggctataagtaatttttaccctgtgcacaggcttcagagctaacctctacaggaactgaatcactgctgaactcaggcattttgttttcttaatgcatctagctgccatcctattcttctgattccctttttaaggtagcagccttggtgggaaactgagtcaagttaaaacttgactcaaggtcataatagctgcatttatcagcagcagccacatccatcctaaggaagaaaatgtcctggctacacaggt

SEQ ID NO: 3995 - DNA, 661 bp, Homo sapiens
  LOC119358
  misc_feature [331]..[331]: Chromosome 10, SNP identification no. = rs11812465
  misc_feature [331]..[331]: allele = c, in linkage disequilibrium with rs11186048, respectively
  misc_feature [331]..[331]: n is a, t, c or g
aagagtgagatgaccccagaggagctgcagaagcgagaggaggaggaatttaacacgggtccactttctgtgctcacacagtcagtcaagaacaacacgcaagtgctcatcaactgtcgccacaacacgaaactcctgggccacgtgaaggccttccacaggcactgcaacatggtgctggagaacgtgaaggagacgtggactgaggtacccaagagcggcaagggcaagaagtccaagccagtcaacaaagactgctatatctccaggatgttcctgcacggggacttggtcatcgtggtcctgcggaacccactcatcgccagcaagnaggggccacctatctgtcgacagaactcactccgctggcctatgaagaccgctgccattggtgttgagaataatagagctctgtgttttttttctagtggaaaaaaaaaaaaggaaagaaaatagatagtattttgagtagaaatgtggctttcgagacaggctatttctttacaacaattttaattctagttctgactccactatatacaaacgatgtgaccttagtaagttacttaatctgtttaattctcagataattattctgtgaaatgggaataattgagtatctaatacatagagtagtggtgagcattaagtaaattaattc

SEQ ID NO: 3996 - DNA, 661 bp, Homo sapiens
  LOC119358
  misc_feature [331]..[331]: Chromosome 10, SNP identification no. = rs10785924
  misc_feature [331]..[331]: allele = c, in linkage disequilibrium with rs11186048, respectively
  misc_feature [331]..[331]: n is a, t, c or g
acgtgaaggccttccacaggcactgcaacatggtgctggagaacgtgaaggagacgtggactgaggtacccaagagcggcaagggcaagaagtccaagccagtcaacaaagactgctatatctccaggatgttcctgcacggggacttggtcatcgtggtcctgcggaacccactcatcgccagcaagtaggggccacctatctgtcgacagaactcactccgctggcctatgaagaccgctgccattggtgttgagaataatagagctctgtgttttttttctagtggaaaaaaaaaaaaggaaagaaaatagatagtattttgagtagnaatgtggctttcgagacaggctatttctttacaacaattttaattctagttctgactccactatatacaaacgatgtgaccttagtaagttacttaatctgtttaattctcagataattattctgtgaaatgggaataattgagtatctaatacatagagtagtggtgagcattaagtaaattaattcacataaatcactgaacacagtacttgacacataataagtacacattaatatttatttttatttataggagtagctaaacagagatgttgatacctaccctacagggttgatttttagtttggtagatcacttgctcgtacag

SEQ ID NO: 3997 - DNA, 661 bp, Homo sapiens
  misc_feature [331]..[331]: Chromosome 10, SNP identification no. = rs12262992
  misc_feature [331]..[331]: allele = t, in linkage disequilibrium with rs11186048, respectively
  misc_feature [331]..[331]: n is a, t, c or g
aattatcacaaacaaaaaagttatacttgcttctgaagatgatcatggcagcattatatgtaaaaggaaaaattggaaacaaactaaatgttcatccccttagtggaatggtcaagtaaccatgatatagctacttgataaaatattattcaatttgtagctttaacattagagcctataacatcgtaggtatttaataaaagaataaattataaaagtgaaaatgatggagaccgtgcatggaaaaaatatgatttgttgtgataatgttaagtaaaagagaaactgaattatatgtatatgattatagctgtgaaaagtaagagtgcangagtgcatggactctaagaaaactggaaaatgaaaatagttgtggtagggtagttggtatgtgggtggtttttttccttaccccttaacattgtatcttagtctgttcgagcggctataacaaaataccgtagactgggtggctggtaaacagcagaaatttatttctcacagttatggagactaggaagtccaaaaccaaggcgttggcagatttggtgtcttgtgaagtcccacttattagttcataggtggccatctttttgccatattctcacactgttgaggggggatggagctctttggagtccctttaataagggtactaatc

SEQ ID NO: 3998 - DNA, 661 bp, Homo sapiens
  misc_feature [331]..[331]: Chromosome 10, SNP identification no. = rs12264800
  misc_feature [331]..[331]: allele = a, in linkage disequilibrium with rs11186048, respectively
  misc_feature [331]..[331]: n is a, t, c or g
aactggaaaatgaaaatagttgtggtagggtagttggtatgtgggtggtttttttccttaccccttaacattgtatcttagtctgttcgagcggctataacaaaataccgtagactgggtggctggtaaacagcagaaatttatttctcacagttatggagactaggaagtccaaaaccaaggcgttggcagatttggtgtcttgtgaagtcccacttattagttcataggtggccatctttttgccatattctcacactgttgaggggggatggagctctttggagtccctttaataagggtactaatcccattattgaggactccatcntcataacctaatcatttctcaaaggccccgcctccacataacatcacattaaggatcagttttcaacatacgcattttgggggaaaacagacattcagtctacaggacattgttactatacttgttatttataagttaacttaaaacaacgacaacaacaacagcaataacaaaaagtcagataagtccagtgcaattcctgccttgccctgggctctgactatccataggcaattctgccatcttagtcaattctatcaaacagcttcaaaaggaaagcttctattgattagctcaccaagccagaaaaattatgacttagaaagttgg

SEQ ID NO: 3999 - DNA, 661 bp, Homo sapiens
  misc_feature [331]..[331]: Chromosome 10, SNP identification no. = rs12265070
  misc_feature [331]..[331]: allele = t, in linkage disequilibrium with rs11186048, respectively
  misc_feature [331]..[331]: n is a, t, c or g
acttctctggagactcccacctccatgtaccttcacagagaaatgtgaaagaacattgaaaagggggaccctctcctgggagctattctctcctttcctgacagcctaaattgggtgtctgagaagcaacaagacctagaaaagagaagaggctttggagcctctattagctgagttgtgtttaggtatgtgcaatagtaaatcttacttgagtggcttaaatatttttaaacacttttattttcctcacttaacaagaagtctggaggtagatagtcccagctggcttggcgctcatggagaagatcggtgatccaggctttttctagcnttcattgtctgtgcgtggcttgtatgctccttgatttaagaaggctgtagcacgcctacattcctggcagaaagatgagctgcctgcagatttttacgtacagctccttggccagaactgtgtcgcagaaccaccctttgctccaagaaacgctggaacattgttttttattctctattttagattctttattctcttatctgaaaggggaagtgcaatgaacatcctcatatgattgttgtgaggctccaatatatgaatacaagtaagcatctagcccagcacctggaacactaagtaggctcacaaactagacaaagctggactcca

SEQ ID NO: 4000 - DNA, 661 bp, Homo sapiens
  misc_feature [331]..[331]: Chromosome 10, SNP identification no. = rs7077870
  misc_feature [331]..[331]: allele = c, in linkage disequilibrium with rs11186048, respectively
  misc_feature [331]..[331]: n is a, t, c or g
attctttacatgtttagtagaattcactagtgaagacgtgtggtcctggcctttcctttgttgagaagttaattgattactggttcaatctccttactaggtatagctatattcagacttttgacttctttataagttaatattggtaggttgcatgtttttaaagatttatccatttattctgtgttatacaatttgttggactataattgttcctagtagtctcttacaattgcttttatttctgtggcatcacttgtaatgtttcctctttcgtttatgatattattcgagtctttcttttttcttagtctagctaaaattttatcanttttttcttctgaaaaaaaacaactcttagttttgttgatttttatctattctctatttgtttatttttgctttgatcttcattgttttctttcttctgctaactttgggcttagtgtgttctctttctagtttcttgatatgtaaagttaggttgtttatttgagatcttttaaatttagcatttatcactaaattttactcttattactgtttttactgcattacataagttttggtatgttgtggttttgttttcatttgtctcaagatattttttattttcttctgtaatccattgatttttcaaaagtgtgttgcttaatttcca

SEQ ID NO: 4001 - DNA, 661 bp, Homo sapiens
  misc_feature [331]..[331]: Chromosome 10, SNP identification no. = rs10881732
  misc_feature [331]..[331]: allele = g, in linkage disequilibrium with rs11186048, respectively
  misc_feature [331]..[331]: n is a, t, c or g
gccagaatcaaaagaataaatataatacaattttatttatataaaatttaagaaaagtcaaaactattctacggcaacagaagcttaataatgattgactttggggcacactgcctgaaagagggcaccataaatcttgttagggtgctatcttgatctgagtgttaatagacgcttctatttatactaagggcaaaaacgggcaaagctgatctatggtgatttgagtcagaaaagtgcttactcttgggggatactgactgggaatggacatgagagagccttcaagggttccggaaagggggatgacatgagtatatatgtataaaanatcagaggtatgcagttgggttttgtgcactttattgtatgtaagttttacctcaatagaagtaacacagaatcaaaattttgacattaaaaaaagagaatattttaggtccattataatcttatggaaccactattttatatgagctccattgttgactgaagtgttattatgtgactgtctatcacagtccaaatagactgaaaaaaactaaatagaagtatgtcttagaattctccttccttcattttttctttcctttgtatctcatttgtagagaaaaatttgcatgtacagtctcaaatacaccatctttaaatcctaactccc

SEQ ID NO: 4002 - DNA, 661 bp, Homo sapiens
  misc_feature [331]..[331]: Chromosome 10, SNP identification no. = rs1936223
  misc_feature [331]..[331]: allele = g, in linkage disequilibrium with rs11186048, respectively
  misc_feature [331]..[331]: n is a, t, c or g
ttagccaaatgttccttattctcttgagattcatttttctgaaagtagacggcagaaaaacagactttgaataatataatggtacttcaagattttaatatttaatttcaatagttcttctaaatggggcaagaatttggcctgtgaacaagaatttggccttttgaattttctttctattttacctgaatttatattgacccgcaaaaacctggaacatcctctgggcaaggtaagatcttgcttttattttttagtagacattaaagcaaacatgattaagcagctaaagtgccaactcaactcatgtagttttcctttctggaagctnctaaaatatctatacaaaactgcggaagcttctttatatgcacaatttgaaacaataaaatgatggaagcattttgtctatgttacccagctaccttgagtacagtataaagtagtagctaaatacccaagttctggagtgagaaagatttgccttctaattctcctctactgtttatgaattctgtgaatttgagtaatttgagttcaagaaactcaaaacctcagtttccttgtttgtaaaatgtaagtggtattacttacttgatggagttgtgaggatttaaaagatccaatgcatgaaagtgcttagcatagagcctcatacaca

SEQ ID NO: 4003 - DNA, 661 bp, Homo sapiens
  misc_feature [331]..[331]: Chromosome 10, SNP identification no. = rs10785931
  misc_feature [331]..[331]: allele = t, in linkage disequilibrium with rs11186048, respectively
  misc_feature [331]..[331]: n is a, t, c or g
aattttttctattattgagtaaccttttccttgcagcgtagatcatggccagcggaactgtagtctaacagcttagaaaccaccgaggaaacagaatatctctctctcagcttctacttgaaaaattctggggaaggactctggaattggccaagttatctcttcttggaccaatcactataattagcggttggggtactgtgattgagctaaccaggaccatgtgcccatctctgttacctgaaccaggtgtgctatgtgcttgctcagaggtgggatggaggaggagttaagggtggaatctctatagcacagatgtgaccagttgagnaaaggaaggtacagataatttttccaaaatctttatagacaaaaaactggaatgcagagacaaccagacactattcaatgttagctgggcatggcccttcatgatgagatgttctcagctgattcacaaatgcttagcttcaagtagtcattggtggaatgtaatcagacaaaaggattcaaaatactttaagggtccagcagcactccaggagagagtttttttcattggattctctatgtttgaagagggagatgaagcacaatagggtgggtaaggataaagacattgtgattttcaccccttggaacttgtattttcttctaattc

SEQ ID NO: 4004 - DNA, 661 bp, Homo sapiens
  misc_feature [331]..[331]: Chromosome 10, SNP identification no. = rs12217255
  misc_feature [331]..[331]: allele = c, in linkage disequilibrium with rs11186048, respectively
  misc_feature [331]..[331]: n is a, t, c or g
gatttgtttttctccaacactttactttgatccgatgggtgttgttatgtgtgagatgggtttcttcaagagacccatctagaagggtcttatttttttacccaactttcagctctataccttttaagtggggcatttagatcatttaaattcaaggttaacattgatatgtgaggctttgatcctcttgtgaagttgttagttggatgctttatagtcttcattgtctagttgctttatagggtctgtgagctatgtacttaagtgtgattttgtggtagcagatactgttctttcattttcatgtttagaattcacttaagaatctctngtaaggctagtctagtggtaacaagtccccttagtgcttgcttgtcagaaaaaaaaatcttttttctcctttgcttatggagcttagttggcaagatagaaattcttgcttggaattatcttttctttaagaatgctgaaaattgctgagttcagtggctcatccttccaatcccaatactttggcagcttgaggtgggaggattgcttgagcctccaggagttcaagaccaccctgggcaatatagtgagaccttgtctctacaagtaataataaaaattagctgcgtgtggtggcatgtggctgttgtcccagctgctcaggaggctg

SEQ ID NO: 4005 - DNA, 661 bp, Homo sapiens
  misc_feature [331]..[331]: Chromosome 10, SNP identification no. = rs1325735
  misc_feature [331]..[331]: allele = g, in linkage disequilibrium with rs11186048, respectively
  misc_feature [331]..[331]: n is a, t, c or g
gtcactgtgtaaaatactgttctatgtgtttccatattttattataacttgagagaaagtaagagaattttgaaggaacatggcttgctgtttctccttcccagagaggtaatgtgacatagtaggaagtatacagattccgggaattagcagacaaagaagcgaatcttgctctttccttttaactgtttaattgacattggattctttccattttctgagccacgaagttttcatttaaaaagggaatgctttcatttggactatagatttttaaatatagattttatagagctcctagttccatgaatcccttgaaattacacaaacntagatttcctggggaagggatccatagctcctattagattctcaaaggggtccctgatccaaagaagacaactactagactagattatttctaagcctattccagatgaatgttaatccagtacaatttcaaaaaagaaaagtggtactttggtctttatcttactagttgatttttaaactacatgcttgtactagcttaaatgaatggttcaattgaaaggaaatattttattactttcttaataaaatttaagaaagccaaaatttgttttctttttcatgctggaaaactctcaacaggtttgatatgaattgcagagtaacagga

SEQ ID NO: 4006 - DNA, 661 bp, Homo sapiens
  misc_feature [331]..[331]: Chromosome 10, SNP identification no. = rs4933548
  misc_feature [331]..[331]: allele = a, in linkage disequilibrium with rs11186048, respectively
  misc_feature [331]..[331]: n is a, t, c or g
gtggtggaatgtcattagttaaggtggggcagggcatattcacttcttttgtgattcttcagttacttcaggccatctgggcatatccagatgcaagtcacaggggatgcgatggcttggcttgggctcagaggcctgacaatgacttgaacccctttaaagaatttaggacaaagtcaccactcacccccttttggggtgttttgttttctttgtggagtttcaagagtcatgggcaaattctttttaggtctaaagctctgttttcctatattgcatgatttgacctctttggcttttggagtgccagagatgacttttcactgtgagngaatttgaccttggcatgtataatggtggatgagaattaggatgagaacaggaagtggtcttggctgttttgtttttcttttctcttttaggaagttgttgtttatggattctaattctagttcagagatgcattctaaagggccttctctattgctttttcttccaaaattaatcttaatttgatttgtctgtgagcatttgcatgaggaactcaactgttgttttcatgggttaatgagagactgagttttcccagtgctaaagaaaaagggcatttgctccttccagccaaaaggtacccctgggtgaccaggggtcttgtgggaaa

SEQ ID NO: 4007 - DNA, 661 bp, Homo sapiens
  misc_feature [331]..[331]: Chromosome 10, SNP identification no. = rs6583686
  misc_feature [331]..[331]: allele = t, in linkage disequilibrium with rs11186048, respectively
  misc_feature [331]..[331]: n is a, t, c or g
tgtactttggcaagagtatatttgaataatttgtctccatggtgctttttaatttattgacagcgtgttgttgaagtctaattgataaggttctgagccatgagatcttaatatattacataaaataacttaaaaaatcaataatcatttaattatttagatgtagtggttataaaagtgacaaaaatctctcatgacgatttggaaggatgatatattacacactgtaacataatttttaggtttttaaagctgtagataagacacaatcattcttaatttgcagcaggcacaggatgagcagatgcaaattaatctgaattccctggangtcattttgacactagtttctttgtcatttcccattcataaatacatgcatcctattacatttatttacatttaactgcagactagtagaaaacctatttaacaaatatgatgctaagctctgactgattatttggcagcatatatctcacaagacaaacccgctattagctgtaaatgtgaggcacagagagaccaaacacatgcaagatgccatccatgactctttttctatggcttggttatgtcacacagatcataggctggagggaagattttcccattttctttcccctaccactttttacactggcaacatgggtcaatattg

SEQ ID NO: 4008 - DNA, 661 bp, Homo sapiens
  misc_feature [331]..[331]: Chromosome 10, SNP identification no. = rs10881750
  misc_feature [331]..[331]: allele = a, in linkage disequilibrium with rs11186048, respectively
  misc_feature [331]..[331]: n is a, t, c or g
gtagaaacacaaattcttttagccagtagtccctattttgccttacgtagctgtggccatttacggtcctgtgataaataaaacagagataatcagtgatttgattggctgattttttcctttgcaaaggcaggtggatgatgcccatctccaagccttcatattatattatctcaacccccacctccaattcttctagctattctatctctccccacatcatggcaatccatataatagaaaagggaaaaaggtgagttcagattctatcttatttataaatcatgtcacatactgacatttttctatgattcacaaagccaccaacagnttcagcataaatgatttgcatcatgcaggtgatatcaaaagtagtttttaaagcaatcatttggggcaacaggaagaatgttatataaatgcctcatagagccttggcattgtgtatatgtaccacatttttttatccaatcctttgttaatggacacttggattgattccatgtatttgctattgtgaatagtgctgcaataaacatatgagtctaggtgtcttttttatataatactttcttttcctttgggtagatacctagtaataatattgctagattatataatagttctatttttagttttttgagaaatcttcatactgttt

SEQ ID NO: 4009 - DNA, 661 bp, Homo sapiens
  misc_feature [331]..[331]: Chromosome 10, SNP identification no. = rs10509591
  misc_feature [331]..[331]: allele = g, in linkage disequilibrium with rs11186048, respectively
  misc_feature [331]..[331]: n is a, t, c or g
ttaaaaatgaaatggaagcaaagatgattatgtgtctggccagaggccagaaaacacatacaagacgcaactaaacccaggccccaaatattctgacaaccagcctggtttcttgctgttggtgtaagccaccactctcgcaagctctcattcttgctcagaagtcatattattctatacaaaaaggagttacattttaaaaattctaagcatgcagtttgttcttctgccactgagctgatccatttatctaatctgcacacacagagtcctgacctcattgtgttttgctagaatcacagtctgaggctttgtggtcgatattatgcancgccactctgccagtttgtgctctgccaatttttttgagcaagcttaattatgcaaatgcatctgataatagatcattcattttagtcatgcacaattatttattttttatgcatagctccaatgacttggacagagcttagtaacagctcatctcatatctatcgaggagatgtaagagagaacatattgtgatgcaggtcaactgctctggtgagcatcaagctgcttcagggaaagttatatttgaggcaaagccaactatttctaaggaaaatgccagctgttgctgccaatctattctcagaatgaaagtccatttcatgggggg

SEQ ID NO: 4010 - DNA, 661 bp, Homo sapiens
  misc_feature [331]..[331]: Chromosome 10, SNP identification no. = rs1360116
  misc_feature [331]..[331]: allele = a, in linkage disequilibrium with rs11186048, respectively
  misc_feature [331]..[331]: n is a, t, c or g
aatgcagtcacagtgcacatataactcaacacaaagcaacattgtttttaacctttattcagtgcttaataggcacaagatattattatgctgagaatcatacatgattttctcatacaatcctttaaaagaacttaactaatgataaactccgagccataggttgataattcattcaaagttgcacagctaacatattcagcagccaaggctgagcctgtgtttctggctgccctaggctttcctaccttatttactgaacatttactaccatctattttgagcaatgcactgttctaggctaggagagaggtagaaaatcaggaaagangtagtttctcctctcaacatccttatgttccagcaggggaaatcagaccctatataataatactagcatctggtagaatgcaatctgcactcaatgaatgccaaccaaacactgatagagcacagaggagaactccagctgaggagaaagtagggcttccaggaggaactggcatttgaactgcacttgagtgatggttagaatataatgagaaaattgtaaaagtaacataaagtaggctgaatgcctaggggcctaggggagggaagaaagggaagccaagaaagtgttatttattaccacctgccactatttgtgattctgctgctt

SEQ ID NO: 4011 - DNA, 661 bp, Homo sapiens
  misc_feature [331]..[331]: Chromosome 10, SNP identification no. = rs7085577
  misc_feature [331]..[331]: allele = t, in linkage disequilibrium with rs11186048, respectively
  misc_feature [331]..[331]: n is a, t, c or g
cgtgctatcagttttttggtgaaaaattttcatccaagttgaggttggagtgcttagaattagctcaaccagaggatgtttcttctgccaataggtggcagagtgagtaagcttgtctgagaatgaaaatgaaatctgaaagaagggcacttggattgggatctcctgttgaatcaacctacaatgatgatgtacctacagtgcaaagcccaccacaaagcatggaagacttgaaaaagacaccatctctttatcttttgcagttcgcatttagcagatccataaaaggctttttctttttataacaagaaacattatgcaaatggttagnagagcaaaagaaacataaagagcgaaatacaactatgttaagtaaactatacatttcttatctcttcttgatataatgcattccttagtcctaactctaatattgaggaaaccaaactgtgcttataaggaaccacaaagaaatcaaaaacaataaaaccccaaaactctgacttagactcaggggccccagccttctctaaaggaataaagtgccctcttcttttcctgactatccactgatactgataaatgctaaagagttttctctggaacaagttgtctttcttctattccttgaataaccaaaggaaattcaattaaaactatt

SEQ ID NO: 4012 - DNA, 661 bp, Homo sapiens
  misc_feature [331]..[331]: Chromosome 10, SNP identification no. = rs1329154
  misc_feature [331]..[331]: allele = g, in linkage disequilibrium with rs11186048, respectively
  misc_feature [331]..[331]: n is a, t, c or g
agttctttaggatgctagtacagggatgaagaagatgggagagctattttcttactggagttccctagattttcttttctgactctgacttgctcctcagttccaacctactgaaaagaattttaacagtcactacccagtgtccataccaaagtgattcatatctatgaagtagatcataaaacaatatttcagaagaaataattctaagttgtggatttcccccattatctaagtagctatcacaaaagatactcaaatacatttttaattttaaaaaagtttaattaaaaaattaacacataccatatagcactttgaggaagtatgngtttttaagacgtaagatgttataaaatcagaaagtgttaagatattgaaaactacaaaatctttatattctgaagaaaactaattcctactaaaacaaagattctggtgatgcccaggaaggctgggaggctctgagctatcccaacatgataatatgtggacaaatgggcaattttattatataagcacatgttcattgtagaaaaagtagagaatatcaagaagaaagcaataaaaagggagcacctataatcccaaaaccaattagataaccattagtaaccttttaaagtgtactgtctagatgttttcatatgcattaattgta

SEQ ID NO: 4013 - DNA, 661 bp, Homo sapiens
  misc_feature [331]..[331]: Chromosome 10, SNP identification no. = rs17507052
  misc_feature [331]..[331]: allele = g, in linkage disequilibrium with rs11186048, respectively
  misc_feature [331]..[331]: n is a, t, c or g
aaagtgcagctaacttctgcaaaacggtgatatcattctgccacttagaaatcttgcactgtatcagaggtgctgtagcaaacaccagccagcacattgaagcttgtctggagaaatgagaagtctgtacagcagcagatttcctttcaaaattgtagtgtaattgaataagcttttacttgctcagacactagataaaatattgcttgaatatatcatcacccagaaaaaagtagtctttctgtgttttttttccctattctctccatatctattcatttctacaatctatgacattctagtcagcagacagattaaggagaaaaatgtnttaaaatgtaccctgggtatcagcatctgtcctcatcagtctccataccccttcaggtttcctgaactgaagtgccttgtgaaccccgcaataaactgttttgcaaattcaaaaaaaaataaaaaaaataaaacaacagaatgaaggaactcctagaaataacctgaagttggtaaaacacattgggttaaaatctagtctttagctctaggacttagaggatataagctagaggcttcctcattcttagaggtcagtgtggcagcagaaataaagttgttataaactaagtgtcaaacaatgtgctgggttacttatgcatccattctc

SEQ ID NO: 4014 - DNA, 661 bp, Homo sapiens
  misc_feature [331]..[331]: Chromosome 10, SNP identification no. = rs11186048
  misc_feature [331]..[331]: allele = c, t
  misc_feature [331]..[331]: n is a, t, c or g
ccaagcccagcggtttgcccaatagtaacaatttataaacttagttgatgatcacaccaccaagtgaatcctaactccattttactattttattctgctctatttactctcgctgtgattcttttttctttctttatgttctcttcccattacatacactaaaatccattcaaaacgttattattcactcttctcacagttcctgtttactctaaataatttatcacaatacttacttttccccattctttttttttcctttttctcctcatccttcttttccccagttacttctttacttcttgaggatatgaatgtagaacagagaagngtgcttaacaaaaaggcttagtgaaaataaaaaataagagaggtagaaaataaaataaaagtaagaaatgaaagccttagagacagtgtgttgcttttggtctaaaaatagagaaaagtgcacttaaaaattgaggcaaactaaatgaaaagggtcatggttgccagctatgtgtaaagctttaaagctatccttttagatttgaggactcctttctgaaagcaagaagtgtggaggggaattcctcaagtggtttaaagggcttcaagtcatcctgcttcctctccacactttggagaacacctttgattaaaaggtttccaaggagga

SEQ ID NO: 4015 - DNA, 661 bp, Homo sapiens
  misc_feature [331]..[331]: Chromosome 10, SNP identification no. = rs6583692
  misc_feature [331]..[331]: allele = c, in linkage disequilibrium with rs11186048, respectively
  misc_feature [331]..[331]: n is a, t, c or g
aacaaaaaggcttagtgaaaataaaaaataagagaggtagaaaataaaataaaagtaagaaatgaaagccttagagacagtgtgttgcttttggtctaaaaatagagaaaagtgcacttaaaaattgaggcaaactaaatgaaaagggtcatggttgccagctatgtgtaaagctttaaagctatccttttagatttgaggactcctttctgaaagcaagaagtgtggaggggaattcctcaagtggtttaaagggcttcaagtcatcctgcttcctctccacactttggagaacacctttgattaaaaggtttccaaggaggaatgtggnagaaacagagaaagagaaaactggcattgacactagaatagaacttgatagtgaggtaaatgaaaagatgacaagcactgagaataatattattgcttagatgttacctgggcctctgtgtgaaccaaattgtcacttaaaggcataaaagaggtcatggttttgaagagtctgtggctaaaggtaagatttaggtagttgtgcttaagtatccagtaattcagttattcagtaatattatgagattctttttttaaatgataatataaaaaaatcaccagctaaatttagacttgttcactgaaaataatggttttgaaacatggtcat

SEQ ID NO: 4016 - DNA, 661 bp, Homo sapiens
  misc_feature [331]..[331]: Chromosome 10, SNP identification no. = rs985604
  misc_feature [331]..[331]: allele = g, in linkage disequilibrium with rs11186048, respectively
  misc_feature [331]..[331]: n is a, t, c or g
tacatttgcttctgttcattgtctcctaaagtaagcagactctgtattctccctctttcacagtcgtgagattgcacctaggatccacagcttatgcaagactagtgtgactcataaacagaaaagaaaactcaagttcactaaattttactttctcctgcaaaggtcttcagatgggtcagaattgccaaaccccttgagtttctgatgaccatgtttcaaaaccattattttcagtgaacaagtctaaatttagctggtgatttttttatattatcatttaaaaaaagaatctcataatattactgaataactgaattactggatactnaagcacaactacctaaatcttacctttagccacagactcttcaaaaccatgacctcttttatgcctttaagtgacaatttggttcacacagaggcccaggtaacatctaagcaataatattattctcagtgcttgtcatcttttcatttacctcactatcaagttctattctagtgtcaatgccagttttctctttctctgtttcttccacattcctccttggaaaccttttaatcaaaggtgttctccaaagtgtggagaggaagcaggatgacttgaagccctttaaaccacttgaggaattcccctccacacttcttgctttcagaa

SEQ ID NO: 4017 - DNA, 661 bp, Homo sapiens
  misc_feature [331]..[331]: Chromosome 10, SNP identification no. = rs985603
  misc_feature [331]..[331]: allele = g, in linkage disequilibrium with rs11186048, respectively
  misc_feature [331]..[331]: n is a, t, c or g
aaagttggtggtcatatggtccatatttcctgacaataatgtaataaacataatcaataagaaaatggattgtgaaaaaaacccacctaatatgagtgcatgtgttagatatttaagaatccctgacattaaacagctttactatttatcaaaattccatttcatagatgagtacatttgcttctgttcattgtctcctaaagtaagcagactctgtattctccctctttcacagtcgtgagattgcacctaggatccacagcttatgcaagactagtgtgactcataaacagaaaagaaaactcaagttcactaaattttactttctccngcaaaggtcttcagatgggtcagaattgccaaaccccttgagtttctgatgaccatgtttcaaaaccattattttcagtgaacaagtctaaatttagctggtgatttttttatattatcatttaaaaaaagaatctcataatattactgaataactgaattactggatacttaagcacaactacctaaatcttacctttagccacagactcttcaaaaccatgacctcttttatgcctttaagtgacaatttggttcacacagaggcccaggtaacatctaagcaataatattattctcagtgcttgtcatcttttcatttacctcacta

SEQ ID NO: 4018 - DNA, 661 bp, Homo sapiens
  misc_feature [331]..[331]: Chromosome 10, SNP identification no. = rs999903
  misc_feature [331]..[331]: allele = a, in linkage disequilibrium with rs11186048, respectively
  misc_feature [331]..[331]: n is a, t, c or g
gacaatgaacagaagcaaatgtactcatctatgaaatggaattttgataaatagtaaagctgtttaatgtcagggattcttaaatatctaacacatgcactcatattaggtgggtttttttcacaatccattttcttattgattatgtttattacattattgtcaggaaatatggaccatatgaccaccaactttgaatgtattgatactttctctttttttctttcttttttttaacttttaggttaaaagggtacatgtgcagatttgttatacagataaattgcatgtcttgagggtttggtgtaaagattgtttcataagccaagtnattagcatagcacccaataggtagttttttgatccttacccttctccctccctccatgctcaataggctccggtgtctgttattcccttctttgtgtccatatgtactcagcgttcataaaacgtcaaaatagatgatgcatttctcagaatgtgtccccacatgactcagacccatgactgtatgtacatatatgtaactacttccctgatcagttgtaggatatttccagtactcataagggctcctatatagccctttctattaatattaagagtgctttattatgcaccaatagacagtgaatacatgtctttctctccgcgttta

SEQ ID NO: 4019 - DNA, 661 bp, Homo sapiens
  misc_feature [331]..[331]: Chromosome 10, SNP identification no. = rs1329181
  misc_feature [331]..[331]: allele = g, in linkage disequilibrium with rs11186048, respectively
  misc_feature [331]..[331]: n is a, t, c or g
tgtagcatgagaaggaataaatgtttccagattactctgctaagatttttgggttatttattaacatagcatggatttaccctatgttgattaatatattatgctttgaaatactaaagaagaaaaccgtgctcgttcttaggttaaataaacgcggagagaaagacatgtattcactgtctattggtgcataataaagcactcttaatattaatagaaagggctatataggagcccttatgagtactggaaatatcctacaactgatcagggaagtagttacatatatgtacatacagtcatgggtctgagtcatgtggggacacattcngagaaatgcatcatctattttgacgttttatgaacgctgagtacatatggacacaaagaagggaataacagacaccggagcctattgagcatggagggagggagaagggtaaggatcaaaaaactacctattgggtgctatgctaatcacttggcttatgaaacaatctttacaccaaaccctcaagacatgcaatttatctgtataacaaatctgcacatgtacccttttaacctaaaagttaaaaaaaagaaagaaaaaaagagaaagtatcaatacattcaaagttggtggtcatatggtccatatttcctgacaataatgtaataa

SEQ ID NO: 4020 - DNA, 661 bp, Homo sapiens
  misc_feature [331]..[331]: Chromosome 10, SNP identification no. = rs17507605
  misc_feature [331]..[331]: allele = t, in linkage disequilibrium with rs11186048, respectively
  misc_feature [331]..[331]: n is a, t, c or g
agtctaggatctaaaagcccacccagcttatgcttatttctcgtggaaacacactttgagaatcttcagctggcaagtaagcaatacagtaactcaaattaccttttatagagatggagtggggggagagagagagagggagagagagagagagagagaaagaaagagagagagagagagagatgtctgagttccagttggtccagctgccagcctccaaattttgagtcttcttttccaggtaccatttgagtaaagaaaccctgaagaagattccagccctagccattgtctgcctgcaactgtgtaagagatcccaagcatgaactanctaactgagccctgtcaaccctcagaatcttgagaaataataataataatttattattattttatccaccatttttgttcgtagaggaccagacaatcagaacagagcttaacacctaaggtattattttaagtatttcatatatttaactcatttgctcctcacaactctgttactttttccattgcacagtttggatagttgatgtacagagaagttaaatgtatcacctggccttttctccatgcaacaaataactcccagatctagcaatgtaaaataataattctgttaatctgggcctggtttggctgatcttggttggtgcca

SEQ ID NO: 4021 - DNA, 661 bp, Homo sapiens
  misc_feature [331]..[331]: Chromosome 10, SNP identification no. = rs1360117
  misc_feature [331]..[331]: allele = c, in linkage disequilibrium with rs11186048, respectively
  misc_feature [331]..[331]: n is a, t, c or g
aatgggcaagttacctaacgtggcctattgttgcaaaatggccccaagaatctccttcattataaccctgccttttgcaatgtgatttgctattgagagacagattttatttcctcatgccatgaatctgggctggctttttgacctggtgtgatgaacaaactatggcagaaccaaaagtgatccacccccaaggttaggcctcaggagccctgaaatgcttcacttgttctcctggaatgctgccaccaccatgaggacaaggccagattaatctgcaagggaattaaagatcacatggcccactcaccccctcccagatgaggagtcnatgaccaggaatgtgaatgaggccgttgcagactccccaggccccagtaagccaattgctaattgcagacacataagtggcaccaaccaagatcagccaaaccaggcccagattaacagaattattattttacattgctagatctgggagttatttgttgcatggagaaaaggccaggtgatacatttaacttctctgtacatcaactatccaaactgtgcaatggaaaaagtaacagagttgtgaggagcaaatgagttaaatatatgaaatacttaaaataataccttaggtgttaagctctgttctgattgtctggtcctctacgaa

SEQ ID NO: 4022 - DNA, 661 bp, Homo sapiens
  misc_feature [331]..[331]: Chromosome 10, SNP identification no. = rs17416796
  misc_feature [331]..[331]: allele = a, in linkage disequilibrium with rs11186048, respectively
  misc_feature [331]..[331]: n is a, t, c or g
tatgtaaagagaagcagttttctccttagaaaaggctcattataacatttgaatcacaatacagtacactcctagagcaggaagattaatgacagataatctacttgagtaaaattaccccctgagtaatatgaaagaattgtggcaattttacggatgtggtaactcaaaattctcctgccatgcgctatcagtatgggcacagttgcagttttggaactgataacttatctggtgcctggggaaaatgacatttcacaaaagtaaacatataatccaagccaacaaccaattcaagattaatgtgccatttgtgagcaggcttcccagnctataaaaccagaaagctttttatatgttttctgtaaggtgggagcattttcacactgtattgctgctttatactacagattattatgaacgccttctcttgtgatatggaaagatgaattaggccagctttgaaaaatatttttctatctatcttgagaaaattatgttttcagggctggtgttgcccaatctaagttttacaggtgagtaaattcacttgtgagggaggaattcaacatactctcttgaggctagaggctgcaataccacacttgtatgcagctggggagaagaaaaaggaggctcagtggggtcctcggtccccacc

SEQ ID NO: 4023 - DNA, 661 bp, Homo sapiens
  SORCS3
  misc_feature [331]..[331]: Chromosome 10, SNP identification no. = rs791114
  misc_feature [331]..[331]: allele = a, in linkage disequilibrium with rs10160134, respectively
  misc_feature [331]..[331]: n is a, t, c or g
ctgtaaagacaaggaaggaagtaatattgctgcaaatacctaatacagagcttgaagcataatcgattctaaaaacaaacaaaggcaacaaacaataaaaggaagtttccattccttctactgagttcatggattttgagctttggtgaaacttctcatctcccataggagaatcccagcattatctgcctccttgatggcacaggaggcaatctggcagttacagatatttagaaaccaaagtgacactgaatatctcagcagtcctaccatcccattcagggctctttccactgtacctgctaaataaactgaccctgaataggatgantatatgaagatcatgatgacaatgacaatgacgatgacaacagtagcatttttgactgctcattctgtgttgtttggtgttctaggaactatatgcattaactaatttcattcttgcaacaacccagggagttacaattattatcatttccctgttatagcagaggaaactgaggcacaggatgattaagtaatttgcctaagttccacagctctaggaagtgacggagctagaatttgaacccaggtgattttacaccagtacctgtgattctaacctttacgtattttaaacatggaaaggaaactgggctaggtatttgactagaat

SEQ ID NO: 4024 - DNA, 661 bp, Homo sapiens
  SORCS3
  misc_feature [331]..[331]: Chromosome 10, SNP identification no. = rs791104
  misc_feature [331]..[331]: allele = g, in linkage disequilibrium with rs10160134, respectively
  misc_feature [331]..[331]: n is a, t, c or g
agattctatgatgaaattcacaaaggtatttatgacataatttaaaatccccaaataggcttccaacaagtgtggccttcttatttgttttttaataacgccagataccagataaaatgaaagtggtccagatctcttgagcatactccagtggttctgaaagcaaggactccgaagctagaaagtgctgagatcaaatccgggacttactatgtgcagactggccttggccaagtagcagcatggcttttcagcggtgaggcacagacaatttagtatgtgcctctgaggactgtcatcaggattaaacaagattatgcatgaaaattgnttagcacattgtggatacattttaaaagatcaataaatgttagttattttttattatgaagagaaagggaaaggaatccaactctcagcatcttttacagattcaatttataataaatgtcctattttgttgtggagaattgaaagaccatgatatcacaggttctacagtgaagtcatattctgaatttaaatcatcgtttaccttaagtgcaatggatgttcggacaagaaagaaagtatatgggctggacaaatcaaggagaacttcaaagaggaggtagcccttgagtttaacctggatgtgaaattgtgctatgtgaaaggaaat

SEQ ID NO: 4025 - DNA, 661 bp, Homo sapiens
  SORCS3
  misc_feature [331]..[331]: Chromosome 10, SNP identification no. = rs703479
  misc_feature [331]..[331]: allele = c, in linkage disequilibrium with rs10160134, respectively
  misc_feature [331]..[331]: n is a, t, c or g
atcaccattctcagagagtgtaaaatgcaatttggagagaagacaaatccattgatagcctgtgtgctagaggaatggtatagaccataaagttgcaagggttcagaggatggagagtcacactgagcttggaagttcatagaaagtctcctagaagagatgggattgatctggactgaactaccaggggtcaggtagagaaggtcattcaggtgcttaggtctgagccaactcagggagttttcaaagttcaactttcctgtgggaatagtttgcaaaacaactgagaatagaaggatggaaaggcagagtgtgggaaatcaaggttgcnatcaaataccatgtttgatttatcacatgcatcctctgtcagtcatctggtggagcactaccttttgttccccttatttttgtcctgttttgtacctccttatagtacacaatagagataagaagaccgaaaatgtaaaagaaggcttccctgctctgcctaaatatgagtcccatctaatttttcctaagactcagttctgggagtaaacgctttgggacatggacattgagaaggtagtcagcactggaaagaaggggaaagtttagtgagtagtaggtatttccagaaaaagaatcctaaagatgcttaatttacaggggattttca

SEQ ID NO: 4026 - DNA, 661 bp, Homo sapiens
  SORCS3
  misc_feature [331]..[331]: Chromosome 10, SNP identification no. = rs10884091
  misc_feature [331]..[331]: allele = c, in linkage disequilibrium with rs10160134, respectively
  misc_feature [331]..[331]: n is a, t, c or g
atgccaagcggacaggtaacactgtgtagatccatctactacccagtggtattttcaactctcagtaatattctatagacctggcgaagaaaaaagaaaccttatgtaacaaggaattctgaggtggagcaataacatgtatcagactgtttctaggatgataccagtactacattgaagtcaattggtagcttggatacatgttgctgttagttttaagagttctatgtataaacatagaaaaatagtactgttataaagtgttgggagatgttccagaagtactagcaattaacaagtattggtagccaattaacagatacttgttganccctagaagtatgccaggtgcaatggagcattgccctggtctccatcagtttatgattcaaatagctagtggtctgatgtggagaaaacagccctgactttaaagacctgggttgtaatcaggaatctgccacctaccagccaggaaatacgacacaagtcacttaaactctcagagtactaattttctcatctctgtagaatggaatcatgctacttgccctttctaaattggaaggttgttgtgaggatcaagggagataataatggctttgaaatgctttgaacgctacaaagccctacaaaatgcaagaattgagagactaatcca

SEQ ID NO: 4027 - DNA, 661 bp, Homo sapiens
  SORCS3
  misc_feature [331]..[331]: Chromosome 10, SNP identification no. = rs4646977
  misc_feature [331]..[331]: allele = c, in linkage disequilibrium with rs10160134, respectively
  misc_feature [331]..[331]: n is a, t, c or g
ctcccattaagaccaaattaacatcatttaaaacatctccaaatagcttttctttgaataattacactctattaatttctgcctcagggtttttttcagaaagatagtaatttactggggatacagtagccacatcatagaggcttgtctaccttccatgatgggtatataaatcaggatcttagatgaagtaccaaaatccaggtgagctgagaccaagatgcaaaaacagtcttgaaagttaattaaatcccagaatagttacatctcatatatatcattaaaagttggttatcaaagaaaccaacaccatggaagctatgtgggaagnttttatcatgcacatatgttgatacatgaattgaatctatgaataatttaaaaacgaatttggagaaaagatctagtaatcttttatgtgatcggcttataaaaatccttaaaagaggatgtgcatacactaaacagtgaggctgatttttgcatgtggattagtctctcaattcttgcattttgtagggctttgtagcgttcaaagcatttcaaagccattattatctcccttgatcctcacaacaaccttccaatttagaaagggcaagtagcatgattccattctacagagatgagaaaattagtactctgagagtttaagtgactt

SEQ ID NO: 4028 - DNA, 661 bp, Homo sapiens
  SORCS3
  misc_feature [331]..[331]: Chromosome 10, SNP identification no. = rs1452268
  misc_feature [331]..[331]: allele = c, in linkage disequilibrium with rs10160134, respectively
  misc_feature [331]..[331]: n is a, t, c or g
atctaccaagatgggggcaacatctgcttatttcactttcacagtcatctagaaaagtatctgggaataccaattattaggtgctaatgcagagaaaaacgaaatgagaaatcaatcattgtcctcttgtgtcatcctttataaacccagacagccctgaggtcatatccttgaccttgccatttcctgagctatacaaccatgggtgattacctatatttcactgaaacttggtttcctccatagaaaaataaagataatatctgtcatattgagatcctgtgaagattaaagttttattaaataaaataaaatgcacacatgctggacntaaatttgatgtgaaataattgcaaggtccgttttccactataacaacaattctttctgtttgttgattggtgagtaaaattggtggtgaagctaggtagaaagaacactccaaataaccattgctttggaggtaggaaattgatttccaaatagtgaaagagattgagagtgtatagctgatctcactcctttgagctgatgatagaaactcttgtagtctcctggataacacatctgccttcctgaccagaactcacaggctggctccctccatataagcatcctgaataattaaacaccatgagtgccacccttcttgcaaaatgaa

SEQ ID NO: 4029 - DNA, 661 bp, Homo sapiens
  SORCS3
  misc_feature [331]..[331]: Chromosome 10, SNP identification no. = rs10884095
  misc_feature [331]..[331]: allele = g, in linkage disequilibrium with rs10160134, respectively
  misc_feature [331]..[331]: n is a, t, c or g
cagtgaaatataggtaatcacccatggttgtatagctcaggaaatggcaaggtcaaggatatgacctcagggctgtctgggtttataaaggatgacacaagaggacaatgattgatttctcatttcgtttttctctgcattagcacctaataattggtattcccagatacttttctagatgactgtgaaagtgaaataagcagatgttgcccccatcttggtagatgttagtggctgcaaagacttgctccattccctattcagtggactctttctcaggatctgtttcaattttgtttcatatcagaaactttctgcatcattaaccaangaaaggcttaatgggattcaatacaatgtattcatgcctgagcctctgagagctgtccctcagatatacttgggggatttactcaaacacccatccctgggacttcccgtggggactgggtggcagcgtggagaatcatcatgacatccacagctctgctcttctccagccctttcctcctccctgtgtacgtcttgccatgcattatgcatttggagtgggaggaggggctgcctttgggttccattccaggactcagaggagctgttgagtcatgacctcactgagtctccccattttccttcccttccacatgccagcaagtcttcc

SEQ ID NO: 4030 - DNA, 661 bp, Homo sapiens
  SORCS3
  misc_feature [331]..[331]: Chromosome 10, SNP identification no. = rs1819476
  misc_feature [331]..[331]: allele = g, in linkage disequilibrium with rs10160134, respectively
  misc_feature [331]..[331]: n is a, t, c or g
ttcagagtttcagctttaaaaaattttaatcactctgcctataactctatgaccagctaatggagtaaataatcattttgaatttctgcaagcagcctttaataatctgaatcagaatcctttaagaattctgaaaccccctcatggtcagacagaataaggacttcttggagtttcagagcagcagagacagatgttaaccaatcagcttgatgtgattgaggatctactatgtacccagtactgtgactggttctctctgtgacagaggtattgattgactgactgattcattcattcatccattcatttaataatcttgtattgagcncttaatatgctcctgatactgttctaaatgaagggcatgtgatagtcacaagacggagaacgtgtcagtcctcattttgccttgtcttggtgaggagataaagctgtttgaccagacactgttcataaacaatgctcaaaagcatttaagaaattgctagactctccaggacagtgcttcccagcgtgagggagatctacaattaaagaagatatcctggaggaggcaaggatcatggtagttttcatagcagctaatttacttgaggggctcagcttgaggaccattcagtgccccaaggggaagtgactcttggaaggagacagtgca

SEQ ID NO: 4031 - DNA, 661 bp, Homo sapiens
  SORCS3
  misc_feature [331]..[331]: Chromosome 10, SNP identification no. = rs4646978
  misc_feature [331]..[331]: allele = t, in linkage disequilibrium with rs10160134, respectively
  misc_feature [331]..[331]: n is a, t, c or g
agtaaagatgaaatagtagaaggaagaaaaagaaaagctaaaaagagagaaagggagtcaggctggcaaacaagaagctaattccaatgcccttccttcttccctgcttcaccaggctctgtctgttgggtgcaggccgtatgccctgccacattgccttcctgacagttctaggttcttgctcacagcagccccctgtctgtaagcattccaccccaggaaagtaggggtaatcgggcccatcctttaaacatcttcattatatcactttcataatcagcttataatgttcttttcaatagacatggagctgaccagaccaagtgcttgnacagcagcttgggctgtggagctattctctgtgccattgatcacaaagacaaaaatcaatcctggctaaggagaaagaagttaaaaataaattgcagggattgatttctatccagaccttctgactcccagtttagaaagggggaaggaagagtatgcatggatccgccagtcatgagatcgcttaataggacctagtctcaaaagcaaaatctagggatattttatatactcacacacataattgtcttttatgtttttatattcttttatttttgtttcctaataactataaaagatgaaaatccatctaaattgcaagctcccagga

SEQ ID NO: 4032 - DNA, 661 bp, Homo sapiens
  SORCS3
  misc_feature [331]..[331]: Chromosome 10, SNP identification no. = rs6584653
  misc_feature [331]..[331]: allele = c, in linkage disequilibrium with rs10160134, respectively
  misc_feature [331]..[331]: n is a, t, c or g
tatagttattaggaaacaaaaataaaagaatataaaaacataaaagacaattatgtgtgtgagtatataaaatatccctagattttgcttttgagactaggtcctattaagcgatctcatgactggcggatccatgcatactcttccttccccctttctaaactgggagtcagaaggtctggatagaaatcaatccctgcaatttatttttaacttctttctccttagccaggattgatttttgtctttgtgatcaatggcacagagaatagctccacagcccaagctgctgtacaagcacttggtctggtcagctccatgtctattgaanagaacattataagctgattatgaaagtgatataatgaagatgtttaaaggatgggcccgattacccctactttcctggggtggaatgcttacagacagggggctgctgtgagcaagaacctagaactgtcaggaaggcaatgtggcagggcatacggcctgcacccaacagacagagcctggtgaagcagggaagaaggaagggcattggaattagcttcttgtttgccagcctgactccctttctctctttttagcttttctttttcttccttctactatttcatctttactataccaactgctattagatttggaactgcaagcaaac

SEQ ID NO: 4033 - DNA, 661 bp, Homo sapiens
  SORCS3
  misc_feature [331]..[331]: Chromosome 10, SNP identification no. = rs6584654
  misc_feature [331]..[331]: allele = t, in linkage disequilibrium with rs10160134, respectively
  misc_feature [331]..[331]: n is a, t, c or g
gtgagtatataaaatatccctagattttgcttttgagactaggtcctattaagcgatctcatgactggcggatccatgcatactcttccttccccctttctaaactgggagtcagaaggtctggatagaaatcaatccctgcaatttatttttaacttctttctccttagccaggattgatttttgtctttgtgatcaatggcacagagaatagctccacagcccaagctgctgtacaagcacttggtctggtcagctccatgtctattgaaaagaacattataagctgattatgaaagtgatataatgaagatgtttaaaggatgggccngattacccctactttcctggggtggaatgcttacagacagggggctgctgtgagcaagaacctagaactgtcaggaaggcaatgtggcagggcatacggcctgcacccaacagacagagcctggtgaagcagggaagaaggaagggcattggaattagcttcttgtttgccagcctgactccctttctctctttttagcttttctttttcttccttctactatttcatctttactataccaactgctattagatttggaactgcaagcaaacatctgttacaaaaaaatacattaaaaagatcagcttttccctctctgcatttcttggg

SEQ ID NO: 4034 - DNA, 661 bp, Homo sapiens
  SORCS3
  misc_feature [331]..[331]: Chromosome 10, SNP identification no. = rs6584655
  misc_feature [331]..[331]: allele = g, in linkage disequilibrium with rs10160134, respectively
  misc_feature [331]..[331]: n is a, t, c or g
tttatagattacatacaacactgtgggtatgtgcacacatatgtgcatgtgtgtatgaatgtcacattgtggagggtggtctaagagaatcgttatgcctgcagtatctggaatctggcaaacatgagtttaaatttcagttcagccctctgctagctgtgtgactttgctgtcttagttgtcccttacttagttgtccccttgtgtcttagttgtccatctacaaaatggagataggatgagggtggattttattgtaattgtagaaggagcatgagaacacactgagtaaattgttgtgcttctgaggaaaggatttttgtagcatctnatcttcactgtgctgagtaccatggcattattactggccttatattgtcatttgtacatcttgtatgttgtttgctttcccaaagagatggtgaactccatgaggtgacagctccatgacccatggtacttaatacagtctggtcacaaaggtactgaaccagtactcgctgattgacaaatgtaagacatagtggaatggtggccggtatccataatgagatttttaaacatgattaacgttcaaggaatgatctaaatttggccagacccttaattattacgtggattcagcagtgggtggggaagaacatcttgtactctgcttccc

SEQ ID NO: 4035 - DNA, 661 bp, Homo sapiens
  SORCS3
  misc_feature [331]..[331]: Chromosome 10, SNP identification no. = rs1377013
  misc_feature [331]..[331]: allele = g, in linkage disequilibrium with rs10160134, respectively
  misc_feature [331]..[331]: n is a, t, c or g
agagtcagaataagtaaaatacaaagaaaagacaattgcatgaacttttacaaatgggtagtaattttacatcaaatactcctttgcgtggttgacaacaccatgccttcgaaaatcaggggctataaaagagcttgctttcctgcaggaaacagggaagcagagtacaagatgttcttccccacccactgctgaatccacgtaataattaagggtctggccaaatttagatcattccttgaacgttaatcatgtttaaaaatctcattatggataccggccaccattccactatgtcttacatttgtcaatcagcgagtactggttcagnacctttgtgaccagactgtattaagtaccatgggtcatggagctgtcacctcatggagttcaccatctctttgggaaagcaaacaacatacaagatgtacaaatgacaatataaggccagtaataatgccatggtactcagcacagtgaagataagatgctacaaaaatcctttcctcagaagcacaacaatttactcagtgtgttctcatgctccttctacaattacaataaaatccaccctcatcctatctccattttgtagatggacaactaagacacaaggggacaactaagtaagggacaactaagacagcaaagtcacacagct

SEQ ID NO: 4036 - DNA, 661 bp, Homo sapiens
  SORCS3
  misc_feature [331]..[331]: Chromosome 10, SNP identification no. = rs10786844
  misc_feature [331]..[331]: allele = g, in linkage disequilibrium with rs10160134, respectively
  misc_feature [331]..[331]: n is a, t, c or g
tggtggccggtatccataatgagatttttaaacatgattaacgttcaaggaatgatctaaatttggccagacccttaattattacgtggattcagcagtgggtggggaagaacatcttgtactctgcttccctgtttcctgcaggaaagcaagctcttttatagcccctgattttcgaaggcatggtgttgtcaaccacgcaaaggagtatttgatgtaaaattactacccatttgtaaaagttcatgcaattgtcttttctttgtattttacttattctgactctggaaacacagattttagaagcctagcaaagtgaaaagagcctggngttgcaagtcagaagctttgagcttggctttaagtcttaccttttagtaccaagatgacctcaagcagccttcctaggcctcaggctccttaattttaaaatgaaggtgtaattagacctcacctgcagggttgtgctcagatcaaatgagattcagtacaataatgaaaactaatagcacagagtactcaacaaatattagttgttatgacctgagtactaggtactaagagactattatagatgagtaagaacattatctaccctcaaagatattacagtacagcaagagaccccaaaaggacctgcttccctctaatttggaacaac

SEQ ID NO: 4037 - DNA, 661 bp, Homo sapiens
  SORCS3
  misc_feature [331]..[331]: Chromosome 10, SNP identification no. = rs10884098
  misc_feature [331]..[331]: allele = a, in linkage disequilibrium with rs10160134, respectively
  misc_feature [331]..[331]: n is a, t, c or g
ttggccagacccttaattattacgtggattcagcagtgggtggggaagaacatcttgtactctgcttccctgtttcctgcaggaaagcaagctcttttatagcccctgattttcgaaggcatggtgttgtcaaccacgcaaaggagtatttgatgtaaaattactacccatttgtaaaagttcatgcaattgtcttttctttgtattttacttattctgactctggaaacacagattttagaagcctagcaaagtgaaaagagcctggagttgcaagtcagaagctttgagcttggctttaagtcttaccttttagtaccaagatgacctnaagcagccttcctaggcctcaggctccttaattttaaaatgaaggtgtaattagacctcacctgcagggttgtgctcagatcaaatgagattcagtacaataatgaaaactaatagcacagagtactcaacaaatattagttgttatgacctgagtactaggtactaagagactattatagatgagtaagaacattatctaccctcaaagatattacagtacagcaagagaccccaaaaggacctgcttccctctaatttggaacaacagctggtaagtgcaacaagcaagccacaaaaaaagagccctgggaatcagaggaagaaaaga

SEQ ID NO: 4038 - DNA, 661 bp, Homo sapiens
  SORCS3
  misc_feature [331]..[331]: Chromosome 10, SNP identification no. = rs10786845
  misc_feature [331]..[331]: allele = g, in linkage disequilibrium with rs10160134, respectively
  misc_feature [331]..[331]: n is a, t, c or g
ccttaattattacgtggattcagcagtgggtggggaagaacatcttgtactctgcttccctgtttcctgcaggaaagcaagctcttttatagcccctgattttcgaaggcatggtgttgtcaaccacgcaaaggagtatttgatgtaaaattactacccatttgtaaaagttcatgcaattgtcttttctttgtattttacttattctgactctggaaacacagattttagaagcctagcaaagtgaaaagagcctggagttgcaagtcagaagctttgagcttggctttaagtcttaccttttagtaccaagatgacctcaagcagcctncctaggcctcaggctccttaattttaaaatgaaggtgtaattagacctcacctgcagggttgtgctcagatcaaatgagattcagtacaataatgaaaactaatagcacagagtactcaacaaatattagttgttatgacctgagtactaggtactaagagactattatagatgagtaagaacattatctaccctcaaagatattacagtacagcaagagaccccaaaaggacctgcttccctctaatttggaacaacagctggtaagtgcaacaagcaagccacaaaaaaagagccctgggaatcagaggaagaaaagatgaactccaa

SEQ ID NO: 4039 - DNA, 661 bp, Homo sapiens
  SORCS3
  misc_feature [331]..[331]: Chromosome 10, SNP identification no. = rs10509782
  misc_feature [331]..[331]: allele = g, in linkage disequilibrium with rs10160134, respectively
  misc_feature [331]..[331]: n is a, t, c or g
agttcaaatccaggctctgccaccatggagctgaatacccgatgcatgtcagttaaattatcagtaaagcaggtttcttggtatttccttcatggggtcattgtgtgcaagagcaggcagtgcatattacatggtaagcatagagcctggccctccaacaatgttgcttgtgctggcagaggacaggagaggcatgacccggagagcatgatggggaagctccaagaagtagcagttggcatttcacaaatattcatggctcttggggaggcagcagtgttttctgagaaacagcttgacagatggcttaaatccgtctactgttgtcccnaaattcactcatgagacatgcaaatcccatgttggtgaaactttgctgttgtatctagcagctcacgtgtatctccaagccttccagaaatcccatgccccaaagaagcgtccctaattctctagaaaatgaatgattttgtttgccttgccctttcaggatatttaatgtattttgaacatgtcaataaaattaattattctctaagcagctatattcacctgtcattcatcccctgtggctgaagatgtttctgttctatagctgtggccatcattttctgcttctccttctcatattatgtattgcctctagcccttccttctgtgc

SEQ ID NO: 4040 - DNA, 661 bp, Homo sapiens
  SORCS3
  misc_feature [331]..[331]: Chromosome 10, SNP identification no. = rs1562966
  misc_feature [331]..[331]: allele = t, in linkage disequilibrium with rs10160134, respectively
  misc_feature [331]..[331]: n is a, t, c or g
gacctatggtatgttcccaggaacacaagcttttagaagtgtattcactgacaaattatgctgttgatccataaattcccatcctaatgattgcgtggggcactgaaatttgccgatgtagcttcaactatgcacagaaggaagggctagaggcaatacataatatgagaaggagaagcagaaaatgatggccacagctatagaacagaaacatcttcagccacaggggatgaatgacaggtgaatatagctgcttagagaataattaattttattgacatgttcaaaatacattaaatatcctgaaagggcaaggcaaacaaaatcattnattttctagagaattagggacgcttctttggggcatgggatttctggaaggcttggagatacacgtgagctgctagatacaacagcaaagtttcaccaacatgggatttgcatgtctcatgagtgaattttgggacaacagtagacggatttaagccatctgtcaagctgtttctcagaaaacactgctgcctccccaagagccatgaatatttgtgaaatgccaactgctacttcttggagcttccccatcatgctctccgggtcatgcctctcctgtcctctgccagcacaagcaacattgttggagggccaggctctatgcttacca

SEQ ID NO: 4041 - DNA, 661 bp, Homo sapiens
  SORCS3
  misc_feature [331]..[331]: Chromosome 10, SNP identification no. = rs1377012
  misc_feature [331]..[331]: allele = c, in linkage disequilibrium with rs10160134, respectively
  misc_feature [331]..[331]: n is a, t, c or g
tcttaggatgctcacctgagctttcaaaatggaagtcctttgcactttctctttcctatttgtgtgtgtgtgtgtgtgtgtgtgtgtatttgagtgggtaaaaaagcaaagataagggcagaaatacaaaaggacagatacgaacttgaattatcattatcatcctagtgtccaaaattcaggagcatttgaagactcccaaataatgtaataagagctaatactttcagtgttatagataaggacgccagagcttcaggtgaaagaaaaggaaggcactgcccatgaaacctctaaagagaaatgttcaaacttgctatcaaaacattgncccctctctgtgctcaaaaatggttctgttccttgtggactgtggattggtagggttttgtaaaaaaaaaaaaaaaaaaaaaaaaaagagaaagaaagaaagaaaagagaaagaaaatggagctgagaggaggttaaagaagatattgcaagagatctagcttatatggttgtccaatacttgtataagtttttcattcaacttgatacatcaaatggcctaattcctttttatgggtggacactatgaggtcaattatttaaatgaaatatactcaaactaggtactagcctctttcttttctatagtatcccagtacttcagaaaata

SEQ ID NO: 4042 - DNA, 661 bp, Homo sapiens
  SORCS3
  misc_feature [331]..[331]: Chromosome 10, SNP identification no. = rs1377004
  misc_feature [331]..[331]: allele = g, in linkage disequilibrium with rs10160134, respectively
  misc_feature [331]..[331]: n is a, t, c or g
cctcacaaaagcaggctgatgcatttgctgcttcacaatgttagggtaaaagcaggctgatgcatgcattttctgcttctctgtgatcctgtggctctctggcacacaagaaagaaataaagtttagtgactattaatctgttttgatgaacttttctcttctttactagcaaacttgctggcattgtaaatcccaaagattattaccacttttcctttcggtgacaccttttattttatatttgatgaatgtcatccaattatttgctctgggcccatccgtcatgctaaacacagaattagctgggtcttttccttactaatgactggntcgttaatctgattttctggatttccattttacaggtttaattgggctcctggccagtgaaaatgattcctttggacaaatgcattggccattaaacacatctatctcttctgacttgttcccgctcttgctgtgaccaagcctaacctgacagatcctttattttttcatttatccttgtttctggatgatggcttgccctggaggaaagacagaaatctgcccccaaaaattagaaccaaagggccttgagtcatttcctagctcccgttggggatttagaagttgagcctatttctgtcacaggagaaaacttaaactgtttctaga

SEQ ID NO: 4043 - DNA, 661 bp, Homo sapiens
  SORCS3
  misc_feature [331]..[331]: Chromosome 10, SNP identification no. = rs2864039
  misc_feature [331]..[331]: allele = c, in linkage disequilibrium with rs10160134, respectively
  misc_feature [331]..[331]: n is a, t, c or g
aggaatcattttcactggccaggagcccaattaaacctgtaaaatggaaatccagaaaatcagattaacgaaccagtcattagtaaggaaaagacccagctaattctgtgtttagcatgacggatgggcccagagcaaataattggatgacattcatcaaatataaaataaaaggtgtcaccgaaaggaaaagtggtaataatctttgggatttacaatgccagcaagtttgctagtaaagaagagaaaagttcatcaaaacagattaatagtcactaaactttatttctttcttgtgtgccagagagccacaggatcacagagaagcagnaaatgcatgcatcagcctgcttttaccctaacattgtgaagcagcaaatgcatcagcctgcttttgtgaggactctgcccctgaagggctgtgcgatctttggaaaataaattcctgcttttgtgaggactctgcccctgaaggggtgtgtgatgtatttgaaaataaattcctttgaccatccaggaaccaggcaggagttgagagttcttcactacatctgtgttttagtcagtatccaatggaggaatccaaactcaaagtctttctgcttaagcagattaattccaacaatctgttattcagtaagtgaataaatattgaccccct

SEQ ID NO: 4044 - DNA, 661 bp, Homo sapiens
  SORCS3
  misc_feature [331]..[331]: Chromosome 10, SNP identification no. = rs10884102
  misc_feature [331]..[331]: allele = g, in linkage disequilibrium with rs10160134, respectively
  misc_feature [331]..[331]: n is a, t, c or g
gcttttgtgaggactctgcccctgaaggggtgtgtgatgtatttgaaaataaattcctttgaccatccaggaaccaggcaggagttgagagttcttcactacatctgtgttttagtcagtatccaatggaggaatccaaactcaaagtctttctgcttaagcagattaattccaacaatctgttattcagtaagtgaataaatattgaccccctgctgtgtacctgcctctatgaggtgtgctcactcctggttaaggtttcaggtacagactagagttggagagcccaggtttataagggttcagatgtaggcgagggttagaaagcccnggtttatattctggctgtaacaatgaaaggctatatgatgttgggcaaattagttgctctctctcagcttcagttttctgacctgtatgaaatattctttacatgatagttattattactcttagttttattaccttacttctgctctcctaagaagatattattttcaaaatatagcaccagactagatgcagtggctcatatctacaattccagcactttgggaggctgaggcagaaggctgcttgagcccaggagtggctttggtcactttgagaccagcctgggcaacagagggagacccagtctctacaaaacataaaaaaataa

SEQ ID NO: 4045 - DNA, 661 bp, Homo sapiens
  SORCS3
  misc_feature [331]..[331]: Chromosome 10, SNP identification no. = rs11192333
  misc_feature [331]..[331]: allele = g, in linkage disequilibrium with rs10160134, respectively
  misc_feature [331]..[331]: n is a, t, c or g
ctgttattcagtaagtgaataaatattgaccccctgctgtgtacctgcctctatgaggtgtgctcactcctggttaaggtttcaggtacagactagagttggagagcccaggtttataagggttcagatgtaggcgagggttagaaagcccaggtttatattctggctgtaacaatgaaaggctatatgatgttgggcaaattagttgctctctctcagcttcagttttctgacctgtatgaaatattctttacatgatagttattattactcttagttttattaccttacttctgctctcctaagaagatattattttcaaaatatagcnccagactagatgcagtggctcatatctacaattccagcactttgggaggctgaggcagaaggctgcttgagcccaggagtggctttggtcactttgagaccagcctgggcaacagagggagacccagtctctacaaaacataaaaaaataaaattagtcaggtatggtggttttgcctgtagtcccagctacttgggaggctgaggtaggaggattgcttgagctgggcaggtcaaggcttcagtgaaccatgattgtaccactgcactctagcctgggtgacagagtgagaccctgtctcacaaaagaaaatttaaaaatacagcccga

SEQ ID NO: 4046 - DNA, 661 bp, Homo sapiens
  SORCS3
  misc_feature [331]..[331]: Chromosome 10, SNP identification no. = rs2218944
  misc_feature [331]..[331]: allele = c, in linkage disequilibrium with rs10160134, respectively
  misc_feature [331]..[331]: n is a, t, c or g
gaaaattattcttaagcctcaagatttaaggttgtttaccctgttgggttttggacttcaccgagacttgttactcattccttccttccttttgcttgcttttgaaattggaatgactgtcccatacctctcccaccattgtatttcagaggcacataacttgtttgatttcacaggcttgcagctggaggggaatctgcctcaggatgaatctccttgagtctcacccgcatcttattaagatgatacgcagatgagactttggacctagattttaaagttgatgctggaacaaattaacacatttgaagctattgggatgaaacgaacntattttgcatgtgagaaggacataaatttgtggggccatggatggaatgctatgggccgattgtttctgtcctctcctaaattcctgttgaaacttaatccccattgcaacagtattaagagttggggccgttcaagaggtgattaggccatgagggcttcttcctcaggaaaggaaaagtgcttcataaaagggctggagaaaactagctaggcttcttttttttttttttttcctttttgtcccttctatccttctgccatgtaaagactcagtattcaaggcattatcttggaagcagacaccgggccttcactagatatctaacat

SEQ ID NO: 4047 - DNA, 661 bp, Homo sapiens
  SORCS3
  misc_feature [331]..[331]: Chromosome 10, SNP identification no. = rs4918147
  misc_feature [331]..[331]: allele = a, in linkage disequilibrium with rs10160134, respectively
  misc_feature [331]..[331]: n is a, t, c or g
aatgtgttaatttgttccagcatcaactttaaaatctaggtccaaagtctcatctgcgtatcatcttaataagatgcgggtgagactcaaggagattcatcctgaggcagattcccctccagctgcaagcctgtgaaatcaaacaagttatgtgcctctgaaatacaatggtgggagaggtatgggacagtcattccaatttcaaaagcaagcaaaaggaaggaaggaatgagtaacaagtctcggtgaagtccaaaacccaacagggtaaacaaccttaaatcttgaggcttaagaataattttcttcactccatgtcccaccttccagnccatggggtgaggattgggtctccaaggctctaggggaccctgcacccatggttttgggtaggtatagcacatgtagtagctgtgacagattagagtccatgcagctgcaccagaatgtggcgatcagagacttgaggtagtactggacagacagccccaacattccatgggagcctggctcctcccttcaaattgttttcccctcaaggccctggcactctgggcctgtgatgagcatggcagcctggaagatctctggtatgccttctgggccattgtttcattgatctggtgagtagcatctggctgccttctagctgtactaattt

SEQ ID NO: 4048 - DNA, 661 bp, Homo sapiens
  SORCS3
  misc_feature [331]..[331]: Chromosome 10, SNP identification no. = rs4918149
  misc_feature [331]..[331]: allele = c, in linkage disequilibrium with rs10160134, respectively
  misc_feature [331]..[331]: n is a, t, c or g
caaacaagttatgtgcctctgaaatacaatggtgggagaggtatgggacagtcattccaatttcaaaagcaagcaaaaggaaggaaggaatgagtaacaagtctcggtgaagtccaaaacccaacagggtaaacaaccttaaatcttgaggcttaagaataattttcttcactccatgtcccaccttccaggccatggggtgaggattgggtctccaaggctctaggggaccctgcacccatggttttgggtaggtatagcacatgtagtagctgtgacagattagagtccatgcagctgcaccagaatgtggcgatcagagacttgaggnagtactggacagacagccccaacattccatgggagcctggctcctcccttcaaattgttttcccctcaaggccctggcactctgggcctgtgatgagcatggcagcctggaagatctctggtatgccttctgggccattgtttcattgatctggtgagtagcatctggctgccttctagctgtactaattttatcaatggtcccttggccacacccttggtgttctctctcaaacttgcctttttaaactttacatggccaggctgagaattttccaaatctttaagttctgtttccctttcaattgtaagctgcctttaattcatgtct

SEQ ID NO: 4049 - DNA, 661 bp, Homo sapiens
  SORCS3
  misc_feature [331]..[331]: Chromosome 10, SNP identification no. = rs4918150
  misc_feature [331]..[331]: allele = a, in linkage disequilibrium with rs10160134, respectively
  misc_feature [331]..[331]: n is a, t, c or g
aagaataattttcttcactccatgtcccaccttccaggccatggggtgaggattgggtctccaaggctctaggggaccctgcacccatggttttgggtaggtatagcacatgtagtagctgtgacagattagagtccatgcagctgcaccagaatgtggcgatcagagacttgaggtagtactggacagacagccccaacattccatgggagcctggctcctcccttcaaattgttttcccctcaaggccctggcactctgggcctgtgatgagcatggcagcctggaagatctctggtatgccttctgggccattgtttcattgatctgntgagtagcatctggctgccttctagctgtactaattttatcaatggtcccttggccacacccttggtgttctctctcaaacttgcctttttaaactttacatggccaggctgagaattttccaaatctttaagttctgtttccctttcaattgtaagctgcctttaattcatgtctctcttcttgcgttttactataaatggtcaaaaaaagccatgcagcactctccacatttgcattgatagttcttccagatatccttgtacaccgcttacaatttctgccttctacaaatctttagacacaggcacgattaagccaagttttttgc

SEQ ID NO: 4050 - DNA, 661 bp, Homo sapiens
  SORCS3
  misc_feature [331]..[331]: Chromosome 10, SNP identification no. = rs10786846
  misc_feature [331]..[331]: allele = c, in linkage disequilibrium with rs10160134, respectively
  misc_feature [331]..[331]: n is a, t, c or g
gttttgggtaggtatagcacatgtagtagctgtgacagattagagtccatgcagctgcaccagaatgtggcgatcagagacttgaggtagtactggacagacagccccaacattccatgggagcctggctcctcccttcaaattgttttcccctcaaggccctggcactctgggcctgtgatgagcatggcagcctggaagatctctggtatgccttctgggccattgtttcattgatctggtgagtagcatctggctgccttctagctgtactaattttatcaatggtcccttggccacacccttggtgttctctctcaaacttgccttnttaaactttacatggccaggctgagaattttccaaatctttaagttctgtttccctttcaattgtaagctgcctttaattcatgtctctcttcttgcgttttactataaatggtcaaaaaaagccatgcagcactctccacatttgcattgatagttcttccagatatccttgtacaccgcttacaatttctgccttctacaaatctttagacacaggcacgattaagccaagttttttgccgctttatagcaaggatgacctttcctctaatttccaataccttactcctcatttccatctaagacttcaacagcattacctttaccgt

SEQ ID NO: 4051 - DNA, 661 bp, Homo sapiens
  SORCS3
  misc_feature [331]..[331]: Chromosome 10, SNP identification no. = rs1463269
  misc_feature [331]..[331]: allele = g, in linkage disequilibrium with rs10160134, respectively
  misc_feature [331]..[331]: n is a, t, c or g
tacctgatgacaaagcttttatactcccaaaatatatcatctggtcacctatcatatgcttaataaccacctctctataggtcaccctgaaccttaccctgaaccaaacacattcatgggaaagcagaccagcatccgagaaggcaagtcccattcctgaatgctggccagagatcatcaattaaaaggggcttctccttggaagatccagctgcctcaacagggaacaaaatgatagcacactccacctcctatcagaagtccagggcaaggctgggagcattggggtttccaagtcaccaacggccaaaagagaatagagtggtccctntgacagcgtgatcagccccgcagccttgagaactcatcctcccatgtctattagagccctgcacaatcacagactctcttaaaagctcacacacaacccaggaaagtttgtgcttgagtaaataatgaagatagaaattatactttaaatgtttaaatgcattgtcgaatggtccaaaacataaaggggctatatgaaggccacagagccctggggtctccaagtacctctgatactgtagtatctcccagagataccaagcttcatcctgccaatctccctttgtcctgagtgtgtccttctccgtacttgccaaaatccaactgatgc

SEQ ID NO: 4052 - DNA, 661 bp, Homo sapiens
  SORCS3
  misc_feature [331]..[331]: Chromosome 10, SNP identification no. = rs1344350
  misc_feature [331]..[331]: allele = c, in linkage disequilibrium with rs10160134, respectively
  misc_feature [331]..[331]: n is a, t, c or g
tttgttccctgttgaggcagctggatcttccaaggagaagccccttttaattgatgatctctggccagcattcaggaatgggacttgccttctcggatgctggtctgctttcccatgaatgtgtttggttcagggtaaggttcagggtgacctatagagaggtggttattaagcatatgataggtgaccagatgatatattttgggagtataaaagctttgtcatcaggtataaggactcctttgggggtgatgaaaatgttttagaactaaatagagggtctggctggatcacacactgtgaatgtactaaaagacaccgaattgtacantttaaaattattagagtatgtgaatttcacctcaaattaaaaaaaaaaccccacctttctcatcattgtaaacacagaattcaggaacatatctacatctgagaggcagggggtcagggcaggtgaggagcacagaggtctatgcaaattgttgttaaaagtctagttatgaggtgttcaaagtgtggttcccagaccagcagcattggcatcacctggaaatttattagaaaattcttgatccccaactcagatctattgaatcagagactctgcagatgggccttagtaatctgtgttttcacaagctttccaggtgattctgatgca

SEQ ID NO: 4053 - DNA, 661 bp, Homo sapiens
  SORCS3
  misc_feature [331]..[331]: Chromosome 10, SNP identification no. = rs1377010
  misc_feature [331]..[331]: allele = g, in linkage disequilibrium with rs10160134, respectively
  misc_feature [331]..[331]: n is a, t, c or g
cagagaagctaccaatgtgggctacacccatgatctatttattctttttgaattgtttattaattcattccaaccataacataattgtcaaatgtatttttcctggatctgaataattactattgttcaaagctctcattattttgaaatgtaatctcacttctgatctaagcacagatttctttccttcatatttacaaatccatgtattgagcagatatttattgactctttccacgtacaagatacttaaaaacatcaaaagttagaggaagaactccaaatttgaaattcagaagtcctgggtttgagtctgaactctgttatctcnggctagaaggctcagggacaagccctgtaacctcacttgtgaaaggatagattcttaatgggaggaaagtggaaaccacgccaagaaatggtcctctggccagggcctgctgaaaagccctgccaacatggcacggctctgcagatggctgctctctgcccaattatcctaactcaggggaaattaatattcacaggagaagataacatggcttgttcagagaaaatagcaggacaacaatagcaaccaggctgctgcgctgaggaggcaattacccaaggcacatgcttcattctcactaaggtccaagcacaggctggagacaggcca

SEQ ID NO: 4054 - DNA, 661 bp, Homo sapiens
  SORCS3
  misc_feature [331]..[331]: Chromosome 10, SNP identification no. = rs1377009
  misc_feature [331]..[331]: allele = t, in linkage disequilibrium with rs10160134, respectively
  misc_feature [331]..[331]: n is a, t, c or g
accttttagagaatattccttgctggctttgggtctctaatcccatggcactctgagttgctcccactgcacagtgcttagatcacaggtgggcaattacaacaatctttcccactggcagattctccctcagaacagagactgactctatttggtcactgtgctctgcacatggcacatacctagtaagtattttcaactaaaaacagagaagctaccaatgtgggctacacccatgatctatttattctttttgaattgtttattaattcattccaaccataacataattgtcaaatgtatttttcctggatctgaataattactattnttcaaagctctcattattttgaaatgtaatctcacttctgatctaagcacagatttctttccttcatatttacaaatccatgtattgagcagatatttattgactctttccacgtacaagatacttaaaaacatcaaaagttagaggaagaactccaaatttgaaattcagaagtcctgggtttgagtctgaactctgttatctctggctagaaggctcagggacaagccctgtaacctcacttgtgaaaggatagattcttaatgggaggaaagtggaaaccacgccaagaaatggtcctctggccagggcctgctgaaaagccctgcc

SEQ ID NO: 4055 - DNA, 661 bp, Homo sapiens
  SORCS3
  misc_feature [331]..[331]: Chromosome 10, SNP identification no. = rs1377008
  misc_feature [331]..[331]: allele = a, in linkage disequilibrium with rs10160134, respectively
  misc_feature [331]..[331]: n is a, t, c or g
gaaagtattagctcttctatcaacaaccacaatgggtttgtaattaccttttagagaatattccttgctggctttgggtctctaatcccatggcactctgagttgctcccactgcacagtgcttagatcacaggtgggcaattacaacaatctttcccactggcagattctccctcagaacagagactgactctatttggtcactgtgctctgcacatggcacatacctagtaagtattttcaactaaaaacagagaagctaccaatgtgggctacacccatgatctatttattctttttgaattgtttattaattcattccaaccataanataattgtcaaatgtatttttcctggatctgaataattactattgttcaaagctctcattattttgaaatgtaatctcacttctgatctaagcacagatttctttccttcatatttacaaatccatgtattgagcagatatttattgactctttccacgtacaagatacttaaaaacatcaaaagttagaggaagaactccaaatttgaaattcagaagtcctgggtttgagtctgaactctgttatctctggctagaaggctcagggacaagccctgtaacctcacttgtgaaaggatagattcttaatgggaggaaagtggaaaccac

SEQ ID NO: 4056 - DNA, 661 bp, Homo sapiens
  SORCS3
  misc_feature [331]..[331]: Chromosome 10, SNP identification no. = rs1034178
  misc_feature [331]..[331]: allele = c, in linkage disequilibrium with rs10160134, respectively
  misc_feature [331]..[331]: n is a, t, c or g
actttccaacttgtgcatgatctgtggcctcatctgatctctttgtgtttcccccacaatctaggtaacaactagtggaagagccagctactacgtgtcttatcgaagagaggcctttgctcagataaagctgcctaagtactcgttgccaaaggtactgcatgcaccactagcggtcctgggtccctctaggcaaagggagggttggagaggctgctttgttgggctactgggaggttttatctgtttggaaggactgctggcatttagactcactcaccaccaagtcgtttggcctcccttagtggtgcacaacctggattctgtattnctgtctcagctgggtaccagccaagagctttgatttcctgtaactcaaaggtctggtataaccttgggtcatttcccaggggcagtaatgaaaggaacactagctttggaatctcctctgaggggctctcccttttgcaaagggctttatcaccaaatagaaggccaaactcagcaggaggacagacgcataaaagtgcacagataagtctggtggttttattgcttctttctacattttaaggctaaataaaaatgtattgcctatgtttctactccccctgccaccatgagtaattaaaaaggggtaaattaatagaatgttaatatc

SEQ ID NO: 4057 - DNA, 661 bp, Homo sapiens
  SORCS3
  misc_feature [331]..[331]: Chromosome 10, SNP identification no. = rs1034179
  misc_feature [331]..[331]: allele = g, in linkage disequilibrium with rs10160134, respectively
  misc_feature [331]..[331]: n is a, t, c or g
gtcgtttggcctcccttagtggtgcacaacctggattctgtatttctgtctcagctgggtaccagccaagagctttgatttcctgtaactcaaaggtctggtataaccttgggtcatttcccaggggcagtaatgaaaggaacactagctttggaatctcctctgaggggctctcccttttgcaaagggctttatcaccaaatagaaggccaaactcagcaggaggacagacgcataaaagtgcacagataagtctggtggttttattgcttctttctacattttaaggctaaataaaaatgtattgcctatgtttctactccccctgccnccatgagtaattaaaaaggggtaaattaatagaatgttaatatcaaatgttggcattttaactcttctattgaaaaatcataaaacttactttggggaccccattccttgtgaacattggcttctggagggagatggaccttagaacctcagtgtgaaaatggacaggttataattgcatcacttaatgaggctacaaaggagtaaaatctcaggttggacacatatcaggtgtaatgttgcaaagacttgggtctctaagctggtactaaggaacatattatgaaagactaaatgagtacagaggtggaggaattatggcatgagaaag

SEQ ID NO: 4058 - DNA, 661 bp, Homo sapiens
  SORCS3
  misc_feature [331]..[331]: Chromosome 10, SNP identification no. = rs1999491
  misc_feature [331]..[331]: allele = c, in linkage disequilibrium with rs10160134, respectively
  misc_feature [331]..[331]: n is a, t, c or g
ataagcaacgataggtatgagagtgttacagaagttcaagggccatcttgacataaaaggtggttttagtcaactatgggtagtgagggcagtttcctagaaaaagtgatgtttaagttgatacaagaaaaataaaggagttaattctgcaaacaaagatggggagaagctgatagaaaatatatgcataggctcgattttaagagacagcaccgttcattcaacaaactaggaagccatcttgagagactgggttgcagagaggctgataaggtcagcagagaccattttaagtagcttcaggggcaatgggaaccaatttctcattttntctaccctctctctgatcagagataagctttatgggaccattgtatagtatggtgtttgcaggatgtacccatcagatattctaaacccaaacaggaaagagatattccagcttggagaaggttagaaaggggaaattcacagttatgctctttctaaaggagaatgccccgttacagtaaccagaaggtctcccatgtttctaagcctaggaaatgagtttagggaactttccaagccatctccctgaggtagggattattttgtttctgtatttgtgcatcttttatgtatttttaaccttctcaggaaaaccaaccattcactcccc

SEQ ID NO: 4059 - DNA, 661 bp, Homo sapiens
  SORCS3
  misc_feature [331]..[331]: Chromosome 10, SNP identification no. = rs1418872
  misc_feature [331]..[331]: allele = a, in linkage disequilibrium with rs10160134, respectively
  misc_feature [331]..[331]: n is a, t, c or g
cagaattaaccatattctactgtcaaataaaaaatgaacccagacttaggtaagaggagattttatttgaaacgacttgcaatacctgcaagcaccttgaagtgaaggcagaaaagaatgacttttatgggaaaaagtaaaaaaaaactagaaataactgggtgtgaaaagtagggtgtgcaggtggcatgatcgagcaattgaacaggaaattttctttggggtcagctgattctcagaagggctgttaaggggggctgttcctcattgccatgcttgcttcagctcccattggttacacaagctcaagagtgggtcaaagttcaggggnttgaggaaagagaaaagctggttttaagtttgagcaagtcaaattagcaggcattttgtccagattggccagcaggacaacattttagcaaatcacgtatgagaaaaagaatgggaatctggtcttataggtaaacaagacagacgtctgaatcttgtcaagtcatatggagagagggggtctgcaataagccatttcccaaacacaaaagggtgcagaatttcttaaccttggctcttttccaggagcacaaggctcaggcaaagatcaacatttttactttcaacctgaatcccatacagaaagaaacaaaaatattttctcttgtag

SEQ ID NO: 4060 - DNA, 661 bp, Homo sapiens
  SORCS3
  misc_feature [331]..[331]: Chromosome 10, SNP identification no. = rs1418869
  misc_feature [331]..[331]: allele = t, in linkage disequilibrium with rs10160134, respectively
  misc_feature [331]..[331]: n is a, t, c or g
agcaatggctaggatttttagtgaaatagtggatagatggatgtacaggcaaagaatatacagcagcaggttgaagagagaatagggagtaagaaaagagattagaattacagataactcttttgagaagtgtggccgtgacacagcagtgaaggataaatcagtatttggggaaatgtaaaaactaaggaaacaaaaggttaatatcattgttattatcattataatgaattttctaagacatatttccctttcctctcttttattattcaaaacagaattaaccatattctactgtcaaataaaaaatgaacccagacttaggtaagangagattttatttgaaacgacttgcaatacctgcaagcaccttgaagtgaaggcagaaaagaatgacttttatgggaaaaagtaaaaaaaaactagaaataactgggtgtgaaaagtagggtgtgcaggtggcatgatcgagcaattgaacaggaaattttctttggggtcagctgattctcagaagggctgttaaggggggctgttcctcattgccatgcttgcttcagctcccattggttacacaagctcaagagtgggtcaaagttcaggggcttgaggaaagagaaaagctggttttaagtttgagcaagtcaaattagcaggcatt

SEQ ID NO: 4061 - DNA, 661 bp, Homo sapiens
  SORCS3
  misc_feature [331]..[331]: Chromosome 10, SNP identification no. = rs10884107
  misc_feature [331]..[331]: allele = t, in linkage disequilibrium with rs10160134, respectively
  misc_feature [331]..[331]: n is a, t, c or g
acttatatactccatttgtttcttcaatagtcttttgttggatgtctaccatgtgccagatactctggtgagtattagagataaagtgatacatcagagaacatagtttatgctctttgggatcttctaatgaaagagacagacatcaaacaaataattacataagagactatttaattataattgtaatgagtgctataaaggaaaagaggagtttcataaatcacgttatctgaggcattatatatttgtcctactcccttctcccgctgtagattttacctccttactatctcaccagtctgtctcctgggaacctcatggagaaccngcttccttggttcaggccctcctgagttattatctgaactgttgctgggaccttttaagcctttctccctgcctctagcattgcccctcttaagtcttctcttcacaatgcttccgcaattaatttgatcatgcaaggatccctatcctctctaactaaatctctgtatatatcaattctaatcatgcctttctcttgcttaaaatcttgtgataattttgtgctattctttgggcaaaacttaggtgtgccatagcaccccttatgatgttacccactgtctgcctcacctccttcagagggaaactgcttttatgcgatacagattcc

SEQ ID NO: 4062 - DNA, 661 bp, Homo sapiens
  SORCS3
  misc_feature [331]..[331]: Chromosome 10, SNP identification no. = rs1377007
  misc_feature [331]..[331]: allele = g, in linkage disequilibrium with rs10160134, respectively
  misc_feature [331]..[331]: n is a, t, c or g
tggagacatcacatactctagtggcctttctcaaatttgactaagtgctatgatagaggtgctaaaaatggtgactggagtacaaatgcttagaggtgacaatgaggatggaacagtcaaggaaatgtgtgggaatctgtatcgcataaaagcagtttccctctgaaggaggtgaggcagacagtgggtaacatcataaggggtgctatggcacacctaagttttgcccaaagaatagcacaaaattatcacaagattttaagcaagagaaaggcatgattagaattgatatatacagagatttagttagagaggatagggatccttgcangatcaaattaattgcggaagcattgtgaagagaagacttaagaggggcaatgctagaggcagggagaaaggcttaaaaggtcccagcaacagttcagataataactcaggagggcctgaaccaaggaagccggttctccatgaggttcccaggagacagactggtgagatagtaaggaggtaaaatctacagcgggagaagggagtaggacaaatatataatgcctcagataacgtgatttatgaaactcctcttttcctttatagcactcattacaattataattaaatagtctcttatgtaattatttgtttgatgtctgtctctttc

SEQ ID NO: 4063 - DNA, 661 bp, Homo sapiens
  SORCS3
  misc_feature [331]..[331]: Chromosome 10, SNP identification no. = rs703484
  misc_feature [331]..[331]: allele = c, in linkage disequilibrium with rs10160134, respectively
  misc_feature [331]..[331]: n is a, t, c or g
aaatgcaataagagtaaatttagactgggactttactaaacttggaacttgaaaagcatcagacataatcacatacatatttatatttggaaagcaattataaataacattccatgtctgccctgccaagacaataatttgggagagttatgattgcttttgaaaactaaaacctgtgacttcctaggtgaacaatggtgaaaatacttcactgatgttgaaacattttcttataatctaggcctaatgtaactttattcattatataaatacccatgttattaagcatctgccatgtgtcagacaacggaaatagagaaaaagcaaaacntgccctcaagaagttgtcttctgatggtggagacatcacatactctagtggcctttctcaaatttgactaagtgctatgatagaggtgctaaaaatggtgactggagtacaaatgcttagaggtgacaatgaggatggaacagtcaaggaaatgtgtgggaatctgtatcgcataaaagcagtttccctctgaaggaggtgaggcagacagtgggtaacatcataaggggtgctatggcacacctaagttttgcccaaagaatagcacaaaattatcacaagattttaagcaagagaaaggcatgattagaattgatatatacagagatt

SEQ ID NO: 4064 - DNA, 661 bp, Homo sapiens
  SORCS3
  misc_feature [331]..[331]: Chromosome 10, SNP identification no. = rs791121
  misc_feature [331]..[331]: allele = c, in linkage disequilibrium with rs10160134, respectively
  misc_feature [331]..[331]: n is a, t, c or g
ctttaaatttttttttaattaaaaaaataaaaatgatccagtccgggattaaaactaaagtgatgtcaggacccaggaagttaacatcagtatgtaagtggcggaccgtaagaacatatggatatagagggctgagaccctaacttggggtcctgactccatctgaaagaccagagactctggtttttggtacagaatatggccaagctaaacatttgtgattcatatttacttcatgagtcatcagtttgaaatctctaatctagaggtgatatatccagtgactggaaaccatccattatgttggagtcagaccacagaggtttaaaanctggttctgccatttgatagccatataatctgaaacagattgataaacttctgtgtgcctgagtttgctcttcagtaaaatgggaataatcataccacctccctcacaaaattattttcatttttaattgaaaaaatacatttagatggcttagaatagtccccaaagaaatccaacctcttcactaggtgagaaaattgaagttcagagaaactgacacattcagcatcatgcagcttactcacagcagtgcttgtattttgacccagaacattaaattccaggttgagtatccttttctctatatcagtgatcttcaacataatttca

SEQ ID NO: 4065 - DNA, 661 bp, Homo sapiens
  SORCS3
  misc_feature [331]..[331]: Chromosome 10, SNP identification no. = rs791122
  misc_feature [331]..[331]: allele = g, in linkage disequilibrium with rs10160134, respectively
  misc_feature [331]..[331]: n is a, t, c or g
cgggattaaaactaaagtgatgtcaggacccaggaagttaacatcagtatgtaagtggcggaccgtaagaacatatggatatagagggctgagaccctaacttggggtcctgactccatctgaaagaccagagactctggtttttggtacagaatatggccaagctaaacatttgtgattcatatttacttcatgagtcatcagtttgaaatctctaatctagaggtgatatatccagtgactggaaaccatccattatgttggagtcagaccacagaggtttaaaagctggttctgccatttgatagccatataatctgaaacagattgntaaacttctgtgtgcctgagtttgctcttcagtaaaatgggaataatcataccacctccctcacaaaattattttcatttttaattgaaaaaatacatttagatggcttagaatagtccccaaagaaatccaacctcttcactaggtgagaaaattgaagttcagagaaactgacacattcagcatcatgcagcttactcacagcagtgcttgtattttgacccagaacattaaattccaggttgagtatccttttctctatatcagtgatcttcaacataatttcattggcagcagaacctcccttaccttttgctcctaaaatattac

SEQ ID NO: 4066 - DNA, 661 bp, Homo sapiens
  SORCS3
  misc_feature [331]..[331]: Chromosome 10, SNP identification no. = rs791123
  misc_feature [331]..[331]: allele = g, in linkage disequilibrium with rs10160134, respectively
  misc_feature [331]..[331]: n is a, t, c or g
catttgtgattcatatttacttcatgagtcatcagtttgaaatctctaatctagaggtgatatatccagtgactggaaaccatccattatgttggagtcagaccacagaggtttaaaagctggttctgccatttgatagccatataatctgaaacagattgataaacttctgtgtgcctgagtttgctcttcagtaaaatgggaataatcataccacctccctcacaaaattattttcatttttaattgaaaaaatacatttagatggcttagaatagtccccaaagaaatccaacctcttcactaggtgagaaaattgaagttcagaganactgacacattcagcatcatgcagcttactcacagcagtgcttgtattttgacccagaacattaaattccaggttgagtatccttttctctatatcagtgatcttcaacataatttcattggcagcagaacctcccttaccttttgctcctaaaatattacacagaattccactgtatacaacagatgcaaatattttctgctctgattgaaacaggattgcaggtctagagccccactcattggttatacctccatgccacatttctggcaatcctcatgactctgaagattttaaagaaaactgtgtaaaccaccatactacagaatt

SEQ ID NO: 4067 - DNA, 661 bp, Homo sapiens
  SORCS3
  misc_feature [331]..[331]: Chromosome 10, SNP identification no. = rs10160134
  misc_feature [331]..[331]: allele = a, g
  misc_feature [331]..[331]: n is a, t, c or g
acctccatgccacatttctggcaatcctcatgactctgaagattttaaagaaaactgtgtaaaccaccatactacagaatttaaaaacataaatgaatatctaatgacaagataggctctgtcttcattgcatgtgtgagcttcctttagcaagggtgtctgtctctgttggcactaactcttaaattttaggtataacaataaaaaatgaaagtagatgaatccttgaaagccatgggaaatgatatcaaccaaagcccctaacacccattttgctgtcacttagcaaggaacagaaatcatgaagcttataatttatagccttggttcnacatggaattgtttaacattgcctataactcaagctttttctcagcaatttcataagtcatagtaattacttggcatcccaatgggcagagagatatggagatctgctgccttacaagccttccatcttctttcaggacatgcacatcatcagtacagacgagaaccaagtatttgctgcggtccaagaatggaaccagaacgacacgtacaacctctacatctcagacacgcgtgggatttacttcactctggccatggagaacatcaagagcagcagaggtctaatggggaacatcattattgaattgtatgaggtatgtagccaaaa

SEQ ID NO: 4068 - DNA, 661 bp, Homo sapiens
  SORCS3
  misc_feature [331]..[331]: Chromosome 10, SNP identification no. = rs791124
  misc_feature [331]..[331]: allele = g, in linkage disequilibrium with rs10160134, respectively
  misc_feature [331]..[331]: n is a, t, c or g
aaaaacataaatgaatatctaatgacaagataggctctgtcttcattgcatgtgtgagcttcctttagcaagggtgtctgtctctgttggcactaactcttaaattttaggtataacaataaaaaatgaaagtagatgaatccttgaaagccatgggaaatgatatcaaccaaagcccctaacacccattttgctgtcacttagcaaggaacagaaatcatgaagcttataatttatagccttggttcaacatggaattgtttaacattgcctataactcaagctttttctcagcaatttcataagtcatagtaattacttggcatcccantgggcagagagatatggagatctgctgccttacaagccttccatcttctttcaggacatgcacatcatcagtacagacgagaaccaagtatttgctgcggtccaagaatggaaccagaacgacacgtacaacctctacatctcagacacgcgtgggatttacttcactctggccatggagaacatcaagagcagcagaggtctaatggggaacatcattattgaattgtatgaggtatgtagccaaaattctccttcccttgggtctgtctctctttttcctgagttttaatggtataaacacaagcactggagttctgggttcagattc

SEQ ID NO: 4069 - DNA, 661 bp, Homo sapiens
  SORCS3
  misc_feature [331]..[331]: Chromosome 10, SNP identification no. = rs791125
  misc_feature [331]..[331]: allele = t, in linkage disequilibrium with rs10160134, respectively
  misc_feature [331]..[331]: n is a, t, c or g
aaaaaatgaaagtagatgaatccttgaaagccatgggaaatgatatcaaccaaagcccctaacacccattttgctgtcacttagcaaggaacagaaatcatgaagcttataatttatagccttggttcaacatggaattgtttaacattgcctataactcaagctttttctcagcaatttcataagtcatagtaattacttggcatcccaatgggcagagagatatggagatctgctgccttacaagccttccatcttctttcaggacatgcacatcatcagtacagacgagaaccaagtatttgctgcggtccaagaatggaaccagaangacacgtacaacctctacatctcagacacgcgtgggatttacttcactctggccatggagaacatcaagagcagcagaggtctaatggggaacatcattattgaattgtatgaggtatgtagccaaaattctccttcccttgggtctgtctctctttttcctgagttttaatggtataaacacaagcactggagttctgggttcagattccagctgtaccacttagcaattgtatgactttgggcaagggacttctatatgcctcaattctagtaaaatagagataaaatatttaccaaggagattattgtgagatgagagatgatggat

SEQ ID NO: 4070 - DNA, 661 bp, Homo sapiens
  SORCS3
  misc_feature [331]..[331]: Chromosome 10, SNP identification no. = rs791126
  misc_feature [331]..[331]: allele = g, in linkage disequilibrium with rs10160134, respectively
  misc_feature [331]..[331]: n is a, t, c or g
attgcctataactcaagctttttctcagcaatttcataagtcatagtaattacttggcatcccaatgggcagagagatatggagatctgctgccttacaagccttccatcttctttcaggacatgcacatcatcagtacagacgagaaccaagtatttgctgcggtccaagaatggaaccagaacgacacgtacaacctctacatctcagacacgcgtgggatttacttcactctggccatggagaacatcaagagcagcagaggtctaatggggaacatcattattgaattgtatgaggtatgtagccaaaattctccttcccttgggtntgtctctctttttcctgagttttaatggtataaacacaagcactggagttctgggttcagattccagctgtaccacttagcaattgtatgactttgggcaagggacttctatatgcctcaattctagtaaaatagagataaaatatttaccaaggagattattgtgagatgagagatgatggatatactgcatctagtgtagtggctgactcaacaaagttagtattcttgtatgtataaacaattgattactagacagaaattaaggtatttggcctaggtgattttttaagtagctttgtaaactctgtgttgcttttgtggaccctg

SEQ ID NO: 4071 - DNA, 661 bp, Homo sapiens
  SORCS3
  misc_feature [331]..[331]: Chromosome 10, SNP identification no. = rs2488541
  misc_feature [331]..[331]: allele = t, in linkage disequilibrium with rs10160134, respectively
  misc_feature [331]..[331]: n is a, t, c or g
tgctacttatgtgccttaaattatttggaaagtcctgttttatgaacaaattttatgggaaaataaaagcgaatatcagtggtgggaatgagagtttttctaagattccaccagatgccgacatctatgcagggtaaaaaactggccttgacataagtgtgtcacttatattaagcttgttaaaaagtgtgataactaattaaagaataatttactaagaaaccaagtgactccatgtagtaactgtagagagaaagagagaaaaaaagaaactattttcagtgacctaaaagatgtggtaccttttatagtgacagtatgtgacctttgncagtcctggacccagtgaaggaacttgactgaccacctggatatggaggattgagttgagcaatgaaggtgtgtctcattatccaatattcaccagtaaccagtggccacacccatacagactgtgatggttgagatcattcacagaaagagatacgttgtctattctgggtggtggcctcagagctgggtgagctgttcccttgtgggttttcctattgaggagtgggagtggctacatgcatgggtttctactttatagtggtctcctctaagcagtgcctgtcaaaatcccagcagccctaaattggtatctaagttggctactcag

SEQ ID NO: 4072 - DNA, 661 bp, Homo sapiens
  SORCS3
  misc_feature [331]..[331]: Chromosome 10, SNP identification no. = rs2488542
  misc_feature [331]..[331]: allele = t, in linkage disequilibrium with rs10160134, respectively
  misc_feature [331]..[331]: n is a, t, c or g
gtgtgtcacttatattaagcttgttaaaaagtgtgataactaattaaagaataatttactaagaaaccaagtgactccatgtagtaactgtagagagaaagagagaaaaaaagaaactattttcagtgacctaaaagatgtggtaccttttatagtgacagtatgtgacctttgacagtcctggacccagtgaaggaacttgactgaccacctggatatggaggattgagttgagcaatgaaggtgtgtctcattatccaatattcaccagtaaccagtggccacacccatacagactgtgatggttgagatcattcacagaaagagatangttgtctattctgggtggtggcctcagagctgggtgagctgttcccttgtgggttttcctattgaggagtgggagtggctacatgcatgggtttctactttatagtggtctcctctaagcagtgcctgtcaaaatcccagcagccctaaattggtatctaagttggctactcagttactgagtgataaggtttggttctgtgtccctacccaaatcccatctggaattgtagtccccacgtgttgagggagggacctagtgggaggtgattggatcataggggtagttttcacatactgttctcatgatagtgagtgagttctcacaaga

SEQ ID NO: 4073 - DNA, 661 bp, Homo sapiens
  SORCS3
  misc_feature [331]..[331]: Chromosome 10, SNP identification no. = rs791142
  misc_feature [331]..[331]: allele = a, in linkage disequilibrium with rs10160134, respectively
  misc_feature [331]..[331]: n is a, t, c or g
cagcacttgtcagttactctctaggaaatcagggtatttctacgattttgttttctaccgaatgacattcactccttcttttaaaatgtacattcatttgccccatgcctttatgttatcatctctctgcctaacagaacaggtgcaatcttaaatatttctgccactctcagtgtattagtccattctcacactgctacaaagatactatgagactgggtgattcatgaagaaaagaggtttgattgactcacagttccgcatggctgggaaagtctcaggaaacttacaatcacagtggaaagcaaatgggaagcaaggtatgtcttanatagtggcaggagagagagaggaagtgaggaagttccacactttaaaaccatcagctcttgtgagaactcactcactatcatgagaacagtatgtgaaaactacccctatgatccaatcacctcccactaggtccctccctcaacacgtggggactacaattccagatgggatttgggtagggacacagaaccaaaccttatcactcagtaactgagtagccaacttagataccaatttagggctgctgggattttgacaggcactgcttagaggagaccactataaagtagaaacccatgcatgtagccactcccactcctcaatagga

SEQ ID NO: 4074 - DNA, 661 bp, Homo sapiens
  SORCS3
  misc_feature [331]..[331]: Chromosome 10, SNP identification no. = rs1562967
  misc_feature [331]..[331]: allele = t, in linkage disequilibrium with rs10160134, respectively
  misc_feature [331]..[331]: n is a, t, c or g
agcttcccaaaggtatttactccccttagtcatctctactagtctccacacctctgtaaaacaatctggaacatttccaaaactgggaccttgttgtttaagggaattatttcagcacttgtcagttactctctaggaaatcagggtatttctacgattttgttttctaccgaatgacattcactccttcttttaaaatgtacattcatttgccccatgcctttatgttatcatctctctgcctaacagaacaggtgcaatcttaaatatttctgccactctcagtgtattagtccattctcacactgctacaaagatactatgagactgngtgattcatgaagaaaagaggtttgattgactcacagttccgcatggctgggaaagtctcaggaaacttacaatcacagtggaaagcaaatgggaagcaaggtatgtcttacatagtggcaggagagagagaggaagtgaggaagttccacactttaaaaccatcagctcttgtgagaactcactcactatcatgagaacagtatgtgaaaactacccctatgatccaatcacctcccactaggtccctccctcaacacgtggggactacaattccagatgggatttgggtagggacacagaaccaaaccttatcactcagtaactgagt

SEQ ID NO: 4075 - DNA, 661 bp, Homo sapiens
  SORCS3
  misc_feature [331]..[331]: Chromosome 10, SNP identification no. = rs791141
  misc_feature [331]..[331]: allele = g, in linkage disequilibrium with rs10160134, respectively
  misc_feature [331]..[331]: n is a, t, c or g
atttgggtctgatcacagggacatgaatcacagtcttatctctatggctttacttgtacaaacaggaacttggaatggcctcagtcctgggaacattaatccaaaccctcaaacaagatgtgacttattgtccaataacaaagttatatttctgcctcctggtatgattagaggcatagaaatgtaagcttcccaaaggtatttactccccttagtcatctctactagtctccacacctctgtaaaacaatctggaacatttccaaaactgggaccttgttgtttaagggaattatttcagcacttgtcagttactctctaggaaatcagngtatttctacgattttgttttctaccgaatgacattcactccttcttttaaaatgtacattcatttgccccatgcctttatgttatcatctctctgcctaacagaacaggtgcaatcttaaatatttctgccactctcagtgtattagtccattctcacactgctacaaagatactatgagactgggtgattcatgaagaaaagaggtttgattgactcacagttccgcatggctgggaaagtctcaggaaacttacaatcacagtggaaagcaaatgggaagcaaggtatgtcttacatagtggcaggagagagagaggaagtgaggaa

SEQ ID NO: 4076 - DNA, 661 bp, Homo sapiens
  SORCS3
  misc_feature [331]..[331]: Chromosome 10, SNP identification no. = rs791140
  misc_feature [331]..[331]: allele = g, in linkage disequilibrium with rs10160134, respectively
  misc_feature [331]..[331]: n is a, t, c or g
actaagtcataactctcctgccttcctcatgggcttgaacacaaagcaggggtgcgatcaatcctgctaaaattgaatggaaaacaagatcaagaaagctgttttatttttaaagttgccctgtctgttatgtcttctctatagatgcagtgacaccatgcatttttttcttcaataagactgaaaacacaagaccaacttaagtggaaagaaaaaaattgcatggatctgggcacattcttcattttgattcatgcctcattccatatcactgtgtcacactgttgtaaatgaccaaggagtttcaggcaccccttcttagaataagagnagcatagtggcaaactcacccactgtaccaagaggatcagagacacaagaatttcttgactgcaaggtcatctgcagcaatgcccacccacccctatttgggtctgatcacagggacatgaatcacagtcttatctctatggctttacttgtacaaacaggaacttggaatggcctcagtcctgggaacattaatccaaaccctcaaacaagatgtgacttattgtccaataacaaagttatatttctgcctcctggtatgattagaggcatagaaatgtaagcttcccaaaggtatttactccccttagtcatctctactagtctccac

SEQ ID NO: 4077 - DNA, 661 bp, Homo sapiens
  SORCS3
  misc_feature [331]..[331]: Chromosome 10, SNP identification no. = rs791139
  misc_feature [331]..[331]: allele = a, in linkage disequilibrium with rs10160134, respectively
  misc_feature [331]..[331]: n is a, t, c or g
ttgctgtcctaatcggttccagcattgaccaggtaaataaggaactttgtttattgaccccctcaaaacccaacaaactagattgcaaactctctgaaggtaaaaactaagtcataactctcctgccttcctcatgggcttgaacacaaagcaggggtgcgatcaatcctgctaaaattgaatggaaaacaagatcaagaaagctgttttatttttaaagttgccctgtctgttatgtcttctctatagatgcagtgacaccatgcatttttttcttcaataagactgaaaacacaagaccaacttaagtggaaagaaaaaaattgcatgnatctgggcacattcttcattttgattcatgcctcattccatatcactgtgtcacactgttgtaaatgaccaaggagtttcaggcaccccttcttagaataagagaagcatagtggcaaactcacccactgtaccaagaggatcagagacacaagaatttcttgactgcaaggtcatctgcagcaatgcccacccacccctatttgggtctgatcacagggacatgaatcacagtcttatctctatggctttacttgtacaaacaggaacttggaatggcctcagtcctgggaacattaatccaaaccctcaaacaagatgtgacttattg

SEQ ID NO: 4078 - DNA, 661 bp, Homo sapiens
  SORCS3
  misc_feature [331]..[331]: Chromosome 10, SNP identification no. = rs2864040
  misc_feature [331]..[331]: allele = c, in linkage disequilibrium with rs10160134, respectively
  misc_feature [331]..[331]: n is a, t, c or g
gaatcaaaatgaagaatgtgcccagatccatgcaatttttttctttccacttaagttggtcttgtgttttcagtcttattgaagaaaaaaatgcatggtgtcactgcatctatagagaagacataacagacagggcaactttaaaaataaaacagctttcttgatcttgttttccattcaattttagcaggattgatcgcacccctgctttgtgttcaagcccatgaggaaggcaggagagttatgacttagtttttaccttcagagagtttgcaatctagtttgttgggttttgagggggtcaataaacaaagttccttatttacctggncaatgctggaaccgattaggacagcaacaaagggcaagacaaatggatatcaaacacagctttattgcttttaaaaattatgcacaaggaagtgggattgataatgctgtaccccagaattgaattcatccattcagtcccagacagaaatgataaatcaaagactgtcttatggaagcctgttcctatgacaccgcagcactgatgtaaaaaggatgtgatctgtgcaggcagatccttaaaagaggggcaggggtatggggatgagctgtacatgcgcagttcttcttttcaacgttaccactctgactgtcagtccttttgccctgg

SEQ ID NO: 4079 - DNA, 661 bp, Homo sapiens
  SORCS3
  misc_feature [331]..[331]: Chromosome 10, SNP identification no. = rs1377014
  misc_feature [331]..[331]: allele = g, in linkage disequilibrium with rs10160134, respectively
  misc_feature [331]..[331]: n is a, t, c or g
tgtccctgacaagcatttattccacacaattagcctggctagcttactttctcacaaatcagcaccatccattcagtccttggctcattccattcctacgtttggaatgcctccttcttcttcactatttcctccccagggcaaaaggactgacagtcagagtggtaacgttgaaaagaagaactgcgcatgtacagctcatccccatacccctgcccctcttttaaggatctgcctgcacagatcacatcctttttacatcagtgctgcggtgtcataggaacaggcttccataagacagtctttgatttatcatttctgtctgggactnaatggatgaattcaattctggggtacagcattatcaatcccacttccttgtgcataatttttaaaagcaataaagctgtgtttgatatccatttgtcttgccctttgttgctgtcctaatcggttccagcattgaccaggtaaataaggaactttgtttattgaccccctcaaaacccaacaaactagattgcaaactctctgaaggtaaaaactaagtcataactctcctgccttcctcatgggcttgaacacaaagcaggggtgcgatcaatcctgctaaaattgaatggaaaacaagatcaagaaagctgttttatttttaaagttg

SEQ ID NO: 4080 - DNA, 661 bp, Homo sapiens
  SORCS3
  misc_feature [331]..[331]: Chromosome 10, SNP identification no. = rs1670032
  misc_feature [331]..[331]: allele = c, in linkage disequilibrium with rs10160134, respectively
  misc_feature [331]..[331]: n is a, t, c or g
atgtcctattctaatataaagttacaaattaacctggcacaagggactacatcacacgtgcgaatattttctgggtatgtaaatatgaggggaaaaaagataaagaaatactagcccatagcataaatgcctgaatcttcagtcagctttttaccagtatatttacaatcttcatccccactgctccacaaggccactcaacatttcataaaataggatccctactcattcgactctggttctcttcttatttccaacaatttgtctataattaagccaaactcatctataagtctctccaaattactcaagttagaattattcttttgtnactccacaacctggtggaatcacacctctaatacaagttagactgtgataattaccctaatagagtcacttgtatcattccagtaattatgaatctcatgcaccagtcctaacatcatcaaacaaaatacactccataaaagtgtgctaatttagctgaattgaatgtgaaaacttactgtttttctcagttgcattactcaagggcacttggagtccagaaaagttgtagtctctttgctaactggccgtatggtacataatcacagtttctgtgagaatttccagtaaagaaggttaaattctaatgacccctagagaccaattaaat

SEQ ID NO: 4081 - DNA, 661 bp, Homo sapiens
  SORCS3
  misc_feature [331]..[331]: Chromosome 10, SNP identification no. = rs791133
  misc_feature [331]..[331]: allele = g, in linkage disequilibrium with rs10160134, respectively
  misc_feature [331]..[331]: n is a, t, c or g
ccaggtatgctgtggttattattgtaaggagttataagttagatgcaaaatatccaggagagcattgaagaaaatgtatcacaccggcagctcagagaatgctgccatagtataactgcgggtgttggaaagaatatttgtttcttgatttattagggagagtaattaaaaagaaatgtagtttatagctggggatgtgaagacactgcaatagagctctatatgaaaagagtgttacgagaataatggtaagtacacacaataggctacattcgctgtcaataccagccttgttttgaaggagtcggcttgacatctcaaagaagagatngattattacttggccttcaagtgttattttctcccctaattatgtaattatagtcatgacaacattgtactttgaagcaggaatttgagaaagaacaagcaggagaatctctctacagcaggagacaactccaacagatttgaaatggaaattatctcagccttgttagattttggggagttcagtggggttgatctccattggtccaaggatttttcagtgccaaggcttgcaaggggaatttccaaataagttcttgctttctttgtctcctctccattaccaagaagaagcttcagaggtccatgcagaagatggagtgatatacct

SEQ ID NO: 4082 - DNA, 661 bp, Homo sapiens
  SORCS3
  misc_feature [331]..[331]: Chromosome 10, SNP identification no. = rs811547
  misc_feature [331]..[331]: allele = a, in linkage disequilibrium with rs10160134, respectively
  misc_feature [331]..[331]: n is a, t, c or g
atacatccaggattttgcagacttattatgaaaattagtatggaaaaatataaaataactaaataattgtttacattgaacgtatactgaaatgacattttagatactttgtttaaataaaaaatattattaaaattaattttgtctgtttgttttttactttataaaatgtgggaagcagaaatgtggaagtgtgtatgtagctcaccttatgtatgtatttgacagtgctggtctaaagcattgccaggtatgctgtggttattattgtaaggagttataagttagatgcaaaatatccaggagagcattgaagaaaatgtatcacacnggcagctcagagaatgctgccatagtataactgcgggtgttggaaagaatatttgtttcttgatttattagggagagtaattaaaaagaaatgtagtttatagctggggatgtgaagacactgcaatagagctctatatgaaaagagtgttacgagaataatggtaagtacacacaataggctacattcgctgtcaataccagccttgttttgaaggagtcggcttgacatctcaaagaagagatagattattacttggccttcaagtgttattttctcccctaattatgtaattatagtcatgacaacattgtactttgaagcaggaat

SEQ ID NO: 4083 - DNA, 661 bp, Homo sapiens
  SORCS3
  misc_feature [331]..[331]: Chromosome 10, SNP identification no. = rs790752
  misc_feature [331]..[331]: allele = c, in linkage disequilibrium with rs10160134, respectively
  misc_feature [331]..[331]: n is a, t, c or g
ctctctgtcaaaccaagcaagtgttgctgaagatatgaagcaactgctactctcataccttgctggtggaaatgcaaaatcccacagccacttttggaataatttggtggcttcttataaacatatacttacattcaactcagcaatcctactcctaagtatttacccatgagaaataaaaatttatggtcaagagaatgtttatagatattttattcataatcacacaaaattttaaaaagtaacctaaatggtcttcagctggtgattgaaaaacaacctctgtcacatcacacaacagaatgctgctcagaaacagaaggaaccaatntattcaacaatgtgggtgaatctcaaatgcattattctaagcaaaaaaaagtcagactgaaaaggttacctactgtataattccatttactcaccctctaggaaaggcaaaactaaagacaaagagagggcaggtatgtgtttgtcggtgactttggggtagagaagggtggactacaaaagggcaataagggaatatttggggtaatggaactgttctatgtcttgattgtgatttgtgcacaatttacacaccagaatgcacaaatcaaaactcacagaacttatactaaaagggtaaattttactatacataaattatacctccata

SEQ ID NO: 4084 - DNA, 661 bp, Homo sapiens
  SORCS3
  misc_feature [331]..[331]: Chromosome 10, SNP identification no. = rs790751
  misc_feature [331]..[331]: allele = c, in linkage disequilibrium with rs10160134, respectively
  misc_feature [331]..[331]: n is a, t, c or g
attcgcccgcctgggtctcccaaagtgctgggattacaggtgtgagccaccgcgcccagcctcgaagtttcattttatccatccaggtatactgggtccagttatttagtcactgaagaaaagcaaatcacacctgcgatgagttaccactaaatccccatcggaacagctacaaacacacacacacacacacacacacacacatacacacacactctctctctctctcctctctctctgtcaaaccaagcaagtgttgctgaagatatgaagcaactgctactctcataccttgctggtggaaatgcaaaatcccacagccacttttggnataatttggtggcttcttataaacatatacttacattcaactcagcaatcctactcctaagtatttacccatgagaaataaaaatttatggtcaagagaatgtttatagatattttattcataatcacacaaaattttaaaaagtaacctaaatggtcttcagctggtgattgaaaaacaacctctgtcacatcacacaacagaatgctgctcagaaacagaaggaaccaatatattcaacaatgtgggtgaatctcaaatgcattattctaagcaaaaaaaagtcagactgaaaaggttacctactgtataattccatttactcaccct

SEQ ID NO: 4085 - DNA, 661 bp, Homo sapiens
  SORCS3
  misc_feature [331]..[331]: Chromosome 10, SNP identification no. = rs697186
  misc_feature [331]..[331]: allele = c, in linkage disequilibrium with rs10160134, respectively
  misc_feature [331]..[331]: n is a, t, c or g
aggtttactcacttcggagagaatgccccagtgggagaaaatggtaagagtttcacagaagtgagcttatttttttgttttcaaatgacataatttaattgacgaaataaaaagtcttctcttctttttttaagtaacctgattggtcttgaaagagaatgccagcccaaataagaataaacaaacaaacaaatggacagagaatctcaggaggagaatagaattaactggaaggacaccaccaggggaatttgacaaagggccaacaatggaattgattagattgctacctggaacagtgggtaggtaagcagagaaaccaaggtagggnaggggcatgatgtctgagccatgccctccctagagacctcctctttgccctaatggcttaaagtcagggccatttcaggaaggacagcatctcaaatgctcatctagggactatgagcccctcagatcacctcagtctttaaaaccaactgcaaaggtgcatctcctaaacctgactactaatcattcctcacagagaatggaatctgggattctctagaaccttctacctgatggaggcctttcagtgttctgtttagccacagagctggtgccttttctgctagaccaccacctaatgattccagaggactcactcccctaaaccagt

SEQ ID NO: 4086 - DNA, 661 bp, Homo sapiens
  SORCS3
  misc_feature [331]..[331]: Chromosome 10, SNP identification no. = rs2278861
  misc_feature [331]..[331]: allele = g, in linkage disequilibrium with rs10160134, respectively
  misc_feature [331]..[331]: n is a, t, c or g
gttttgtgggtgatactcagatatcttaaagttttaattgtatttatcccccattcttccagtatcatggttaactgaggtttactcacttcggagagaatgccccagtgggagaaaatggtaagagtttcacagaagtgagcttatttttttgttttcaaatgacataatttaattgacgaaataaaaagtcttctcttctttttttaagtaacctgattggtcttgaaagagaatgccagcccaaataagaataaacaaacaaacaaatggacagagaatctcaggaggagaatagaattaactggaaggacaccaccaggggaatttnacaaagggccaacaatggaattgattagattgctacctggaacagtgggtaggtaagcagagaaaccaaggtagggcaggggcatgatgtctgagccatgccctccctagagacctcctctttgccctaatggcttaaagtcagggccatttcaggaaggacagcatctcaaatgctcatctagggactatgagcccctcagatcacctcagtctttaaaaccaactgcaaaggtgcatctcctaaacctgactactaatcattcctcacagagaatggaatctgggattctctagaaccttctacctgatggaggcctttcagtgttct

SEQ ID NO: 4087 - DNA, 661 bp, Homo sapiens
  SORCS3
  misc_feature [331]..[331]: Chromosome 10, SNP identification no. = rs697189
  misc_feature [331]..[331]: allele = t, in linkage disequilibrium with rs10160134, respectively
  misc_feature [331]..[331]: n is a, t, c or g
ggataactcccatatcatctgtgggactcagccaatggtcgctttgaaattggtggaataagccctattcctcttctttttcccagttggctggcaaaggatccatgagactatgcaaagcactcaccagtgttcccatgttttgagatttgcacgcctttgatattttgacgggaaaagagcatcaccacaaaacaagccgctagaggattaaaggagatttatcacccagaagggttctagggtaagcacaaattctactcaaacttttattccttatattctatatgctgggcaaggaaagcagatacttataatgacaacatcctgnatcaaagaaagattcccttaactctttttccatagaagttatagcatgtttcaaaggcaaatagcaaatagcatattgccaaaggcaattaaattagtttaaatatatataaacaataggttcaatggcaggttttgtgggtgatactcagatatcttaaagttttaattgtatttatcccccattcttccagtatcatggttaactgaggtttactcacttcggagagaatgccccagtgggagaaaatggtaagagtttcacagaagtgagcttatttttttgttttcaaatgacataatttaattgacgaaataaaaagtcttctct

SEQ ID NO: 4088 - DNA, 661 bp, Homo sapiens
  SORCS3
  misc_feature [331]..[331]: Chromosome 10, SNP identification no. = rs697190
  misc_feature [331]..[331]: allele = g, in linkage disequilibrium with rs10160134, respectively
  misc_feature [331]..[331]: n is a, t, c or g
tccctgcctttgttgtaagtgatgtatgtcttcacctggtcgtccaccttcttgtttgccagaaatatccctttgatacctgctacctaggaaaaaaggtgagagatggagaaccatgctgggccaacatgcctttggtcttggagaagcccttagagaagccgcagaatttcccacggcatgttggggttccaagcaagaaaagaaggaacatgataggaaacgttgaatgccatgtggtctctgaaaaatgtttaaaaagttcatctctgaaccttatgtcaccccctagatgtccctttctatgcttacccatctgtttttttcccantttgctcgtctctgtactttgttccataggactttacctttaattaactattaacattccctctgagatgggagtggctgacaagaactgaaggagttaccccttccagcaaacatgtttttctgctcagaagaggcctgtagatgggtatttcataacaatggaagttgaggcattgtgattagtagtaatgaagatatcctggggcagatgatccagcttggaggcctggcatctgtctctttccatgccactagctcactatgtgactttggataactcccatatcatctgtgggactcagccaatggtcgctttgaaattggtgga

SEQ ID NO: 4089 - DNA, 661 bp, Homo sapiens
  SORCS3
  misc_feature [331]..[331]: Chromosome 10, SNP identification no. = rs703490
  misc_feature [331]..[331]: allele = g, in linkage disequilibrium with rs10160134, respectively
  misc_feature [331]..[331]: n is a, t, c or g
ctgggattcatctcttaactcctggttgaggacatctccgaaggcagatggaaatctagtatagagagtttggcaattgccttttgcaagcagaaacactagggttcctaatatccttaacactgtggtttcaagctagtaataaagacctcacatccttgcagtgccttacagcatccaaagcttgcttttcttgccttgattgcataactgcacgatgatgtagaaatggcaattactatactcctcaatttagagatgaagagactgtgggcaggtggaaacaggtgtcatgtcccagcccacaatctctctgattccacctctagtnctctgttctgtagcccttcagccagacccgtctctgagcccctttccgtgccagctccacagctaaccagaccccctgccaaacttcctgtaaactctgaatgttcacaccctcctattgttctttctgtggaggccctcctcccgcccctgcccctgcaggggcaagttgcttgtatactgtcagcttcctccccaactgagcctgtagccaccctgtatgggcagcaactccctctggcatgagtggtggtgagagaagcgtagctagccctcagaggacttcaatattctctcccttttattttatttttttaatatttaaggagca

SEQ ID NO: 4090 - DNA, 661 bp, Homo sapiens
  SORCS3
  misc_feature [331]..[331]: Chromosome 10, SNP identification no. = rs10786848
  misc_feature [331]..[331]: allele = g, in linkage disequilibrium with rs10160134, respectively
  misc_feature [331]..[331]: n is a, t, c or g
cgctgcaacctctgcctcccagattcaagcgattctcctgcctcagcctcccaagtagctgggattacaggcatgcgccatcatgcttggctaattttttttttttttttttttgtatttagtagagacagggcttcaccgtgttagtcaggctggtctcaaactcctgacttcggtgatctacctgcctcagcctcctaaagtgctgggattacaggccactgcacctggctcatgctaaccttttattgataaggaaatcctgagaatgagacagagagaggccttaaattcactttggctttcatctgccaagacaaaaaccaatttncccaaagtcgccaaaacaaaccaaacaaaaaacccaactaatactttcttaccttccggacttattggccagagttgacttgttagtagccacgacacactctgaaacaactatgattattttaggaactgacggactacatggtaagaaaagtaaagttcatttccaattatacatgttttcacttttgaaatgagaaacctgtttctttgacaagcaatttagatatgcccaactttcttggggctagtttaaatgattatttagccttcaatatatttttttaaaaggctgaaataatcaagtccttaaaattcaagacagatgatg

SEQ ID NO: 4091 - DNA, 661 bp, Homo sapiens
  SORCS3
  misc_feature [331]..[331]: Chromosome 10, SNP identification no. = rs1484240
  misc_feature [331]..[331]: allele = c, in linkage disequilibrium with rs10160134, respectively
  misc_feature [331]..[331]: n is a, t, c or g
cccttctaagattttttttttctaggaagctgctaggttctctttggcccctgtaaaactatagctaaatcatagccaattggttcaaacatttcttatcaggaaagaatttcaaacatagctttgaggatgcaggaaagcagtgtttttctatctgattccacatctcagtcaagctaaagaaaagctctctttaaagtgctaatcaaagggcaaacagcctttcatgaaatagtggaccaaagaggcccaagtgctgcaacagccacaggcatctcatcatctggagagccactgcctgagactgcaataggccctccagcttgtcagncagcctgtcctcagccttaagtaataagaacagtcacatttcattttgaatttggctagactagatggttcccattacagttaccagggggatgtttaaataataacatctgaaaagacagtagtaaaaagagcaataaaggtagccaagtcccaggcctccactctggggactgtctcccatgtaaatcctcctgcaaagctacggtgttagaaatgtccatgttcctggagcactggcctccaggaaaagtggaaattgggcagattattgtgaaaggtggaggaaatcagaatcattcccagtaagctcctcattctctagctgccc

SEQ ID NO: 4092 - DNA, 661 bp, Homo sapiens
  SYT9
  misc_feature [331]..[331]: Chromosome 11, SNP identification no. = rs7942860
  misc_feature [331]..[331]: allele = g, in linkage disequilibrium with rs7126337, respectively
  misc_feature [331]..[331]: n is a, t, c or g
aaaggaatccacctgaatgccatgtcccagctttctctgttattgtccattcacggccaccctgtgatagctaggttttctcaagctgaactaaggactttggttataaaaggagaaaaaagatataatttcctgtggacagcaaagtgaccctgcatctaggaaatttactcattttttcagaggtgtggaaagactagggcacagaccagcgggcctgagccatcagaaaggttcttttttgtccaggtagttatagtgccctgttgggggagtaccgcacccagatttccctgacttggtgttcacagaggacttgatgcaattgtgntttaaaaaaataagcctaagtcacagttggaactgaagtgcctcacccagtctgtcatctgtaccaacttgtggaaaggaaagtgctgagtgtgagcacttttgtccatagaaagcaattagaatgctctgttggttgcctttatggtgttttatatgttaatgatgtgggacataaacttgcaggcctcagagactagcctttaaggcagagggaacagcaagcgcaaaggccctgaagtggtagcattattgatatgattctagaaatggtgacttcagaggtggctggagaggtgtgaaacagatggagagtgataagacgtgtatg

SEQ ID NO: 4093 - DNA, 661 bp, Homo sapiens
  SYT9
  misc_feature [331]..[331]: Chromosome 11, SNP identification no. = rs7126337
  misc_feature [331]..[331]: allele = c, t
  misc_feature [331]..[331]: n is a, t, c or g
attggattatgaatgcaatttgcaggtacagccgcaagtatttattgaaggaagagatgtgaaaggtgagagaagggcaattaaggatgcttcaaaggctttttgacctaaaaaattccatgtacaagtagaagtcttcaggaagaaggtaggggtgaggagggaaatcatgaggtttattttttattttattttaactttttgtaacacattaagtgtgtgatgcctctttagatagccaagctgttttacagttgaacagtgacctgaggtatgactatcctctttaatgtcaattgctctatgctcgtattttttaactggagacttngctgtcaagaagattaattggttatagaacagtatgtattgttagaaggttttccttgtagggaattaaaaggtctcttaaatttctacccatggatcttgattatactttttttggtcaaaaagcattagtcttatctctcttctccatcatacacctttggctattaggaggtaaactagcctaacttatctagatccactctttccaaggaacagaaaggaggattggatcatgtaatgactaggtcttaaacatgtttttatcattttctttttaagtcttttcttctgtagggtgccaaccatgtctgtgccaagcactttatgt

SEQ ID NO: 4094 - DNA, 661 bp, Homo sapiens
  SYT9
  misc_feature [331]..[331]: Chromosome 11, SNP identification no. = rs1487866
  misc_feature [331]..[331]: allele = c, in linkage disequilibrium with rs7126337, respectively
  misc_feature [331]..[331]: n is a, t, c or g
aacagctgcttagttgtttcaatttgtgttttttttgttggtaagactgaatattttttgttttgaaccttcttatatttactcttaagtgaattttttgtgttctctaccacattctctatcatgtaccagtttattttttgagaatcttaatgtttttttctaccaatttccattaattagaatgtaaatattctgtcaaattagctcacagaaggaatattgtatagtgaatgagctcaggttgtctgactataatcaacccattatattaaagtgtcttttgaaatttcaggggtggttcaataaatagggattcgttgtaacactnttttccaatgcaaaatgctgcatttatttatatgaaatatgaaaaagttgttataatttgaatctctttttctttatgttttctttcccactccaacctaccccaccctacccttgtgcagctgttacttaaccacgttgaattgatcaatcttttctagttataattaagttaaattccaaaaacatttattgagggccccttaagtgctatgtacaaggttgggcatctgtcattcaaagatacattagacatgcttactgcctctatggaattgacataaaacaataatggcaattaataaaatcaagaagggagatatctactgga

SEQ ID NO: 4095 - DNA, 661 bp, Homo sapiens
  SYT9
  misc_feature [331]..[331]: Chromosome 11, SNP identification no. = rs1487868
  misc_feature [331]..[331]: allele = c, in linkage disequilibrium with rs7126337, respectively
  misc_feature [331]..[331]: n is a, t, c or g
ttttttgagaatcttaatgtttttttctaccaatttccattaattagaatgtaaatattctgtcaaattagctcacagaaggaatattgtatagtgaatgagctcaggttgtctgactataatcaacccattatattaaagtgtcttttgaaatttcaggggtggttcaataaatagggattcgttgtaacactcttttccaatgcaaaatgctgcatttatttatatgaaatatgaaaaagttgttataatttgaatctctttttctttatgttttctttcccactccaacctaccccaccctacccttgtgcagctgttacttaaccangttgaattgatcaatcttttctagttataattaagttaaattccaaaaacatttattgagggccccttaagtgctatgtacaaggttgggcatctgtcattcaaagatacattagacatgcttactgcctctatggaattgacataaaacaataatggcaattaataaaatcaagaagggagatatctactggatacagtacagaaaaaagaggagagaagtaattagctgacttgagtggatctgcagaggcttcctacagaagtctattcttgggcagaagagtttgtctggaactagttggtgggaagagcattctaggaatttaca

SEQ ID NO: 4096 - DNA, 661 bp, Homo sapiens
  SYT9
  misc_feature [331]..[331]: Chromosome 11, SNP identification no. = rs10839751
  misc_feature [331]..[331]: allele = t, in linkage disequilibrium with rs7126337, respectively
  misc_feature [331]..[331]: n is a, t, c or g
agatcaagacataaagactaaactggcaccactgagaagttgacaaatgagtaaaggtcagaaggaaatgtgggagcaagatacacacgtagcagggggaagagcgttccaggcaggagagcggcgggtacaaaggtctcaaggcaggagcatgcttgacgtgttcagatattagccaagggttagtatgactgtagtgaggttggcaaaaagagagtagtagtagatgaggtcagagaggtgatggcagactgattgtaggcctctataagccattttaaaaaagtgacttttacttgcagtaagataggaagccattagcaagttttancagaagagagataacatctgacttaggaagagaaaggatcactctgaccagcacatagaaaacagactataggaggggaaggttgaagttagggagaggagttataaagctgttgtaatcatgtaggtgaaagatggtggtggcttggaccagagtgatagcagtggagatagtaggaggtggtcagattctgggtagctggaaggtggagatgacaacatttactaatagatggatattgagtgtgaaagacagagaggagtcaagactaagactgtggcctgagcagctaggagaatagagttgtaggagaagtaattttgaggggaa

SEQ ID NO: 4097 - DNA, 661 bp, Homo sapiens
  SYT9
  misc_feature [331]..[331]: Chromosome 11, SNP identification no. = rs10839752
  misc_feature [331]..[331]: allele = t, in linkage disequilibrium with rs7126337, respectively
  misc_feature [331]..[331]: n is a, t, c or g
agatacacacgtagcagggggaagagcgttccaggcaggagagcggcgggtacaaaggtctcaaggcaggagcatgcttgacgtgttcagatattagccaagggttagtatgactgtagtgaggttggcaaaaagagagtagtagtagatgaggtcagagaggtgatggcagactgattgtaggcctctataagccattttaaaaaagtgacttttacttgcagtaagataggaagccattagcaagttttaacagaagagagataacatctgacttaggaagagaaaggatcactctgaccagcacatagaaaacagactataggagggnaaggttgaagttagggagaggagttataaagctgttgtaatcatgtaggtgaaagatggtggtggcttggaccagagtgatagcagtggagatagtaggaggtggtcagattctgggtagctggaaggtggagatgacaacatttactaatagatggatattgagtgtgaaagacagagaggagtcaagactaagactgtggcctgagcagctaggagaatagagttgtaggagaagtaattttgaggggaatgaccagcagctcagttcttgatgtgggatattggaaatgcttattagtgagcccagtggggatacagactagccgtc

SEQ ID NO: 4098 - DNA, 661 bp, Homo sapiens
  SYT9
  misc_feature [331]..[331]: Chromosome 11, SNP identification no. = rs2346804
  misc_feature [331]..[331]: allele = g, in linkage disequilibrium with rs7126337, respectively
  misc_feature [331]..[331]: n is a, t, c or g
taatgttgacaagcatttttgatagagaggtgggaacaagagcctgattggcatggctgtaaaagagattgaagggagaggaattggggcagtaaagacagaatagtcttttaagtttttctgctgacaagagcaaataaatggcatagtagttgctagtgagggaagtgagatcaagggttgtatttatttatttattcgtaagttaggagacttaacagcaccaaggtgaagggaatgactagtacagaacaaaaaatcatgatataggataaagaggggaggattgctagaatgatatccttggttgagaagttgggtacatttcccnaaagttcagtgtaggcatttaggcaccaaaggcacatagatgatatttaaaaccaaaaaatctagatgagcttactgtcttagtccatttgcactgccctagcaaaactaccataagctgggtagcttatgaacaacagacatttatttctcacagttctggaggctagaaagtccaagagcaaggagctggcagatgctgtgtcaggtgagggcgtgttcctcatagacagcaccttctctctgtgtcctcacatggtggaaggggtttctttcataagggcattaatcccattcatgggggctctgctctcatagtctagtcacttcc

SEQ ID NO: 4099 - DNA, 661 bp, Homo sapiens
  SYT9
  misc_feature [331]..[331]: Chromosome 11, SNP identification no. = rs10743013
  misc_feature [331]..[331]: allele = a, in linkage disequilibrium with rs7126337, respectively
  misc_feature [331]..[331]: n is a, t, c or g
taaaagagattgaagggagaggaattggggcagtaaagacagaatagtcttttaagtttttctgctgacaagagcaaataaatggcatagtagttgctagtgagggaagtgagatcaagggttgtatttatttatttattcgtaagttaggagacttaacagcaccaaggtgaagggaatgactagtacagaacaaaaaatcatgatataggataaagaggggaggattgctagaatgatatccttggttgagaagttgggtacatttcccgaaagttcagtgtaggcatttaggcaccaaaggcacatagatgatatttaaaaccaaaanatctagatgagcttactgtcttagtccatttgcactgccctagcaaaactaccataagctgggtagcttatgaacaacagacatttatttctcacagttctggaggctagaaagtccaagagcaaggagctggcagatgctgtgtcaggtgagggcgtgttcctcatagacagcaccttctctctgtgtcctcacatggtggaaggggtttctttcataagggcattaatcccattcatgggggctctgctctcatagtctagtcacttccccaaaggccccaactcttagcattatcatactagggattaggtttcaacatacaaattt

SEQ ID NO: 4100 - DNA, 661 bp, Homo sapiens
  SYT9
  misc_feature [331]..[331]: Chromosome 11, SNP identification no. = rs4757988
  misc_feature [331]..[331]: allele = g, in linkage disequilibrium with rs7126337, respectively
  misc_feature [331]..[331]: n is a, t, c or g
tgtcctcacatggtggaaggggtttctttcataagggcattaatcccattcatgggggctctgctctcatagtctagtcacttccccaaaggccccaactcttagcattatcatactagggattaggtttcaacatacaaatttggggaggacacaaacattcagatcttcacacttaccaaggggtgaataaaaatagaaaagaagtcaaacaactggttagaagtcagagaaatgtgcaggaaccaataaggagactgagagggaccagaaagtaacgtggagaaaaatcaagaacatgatggcttggaaattaagaaagtattcctangtggaaggaaggatcccctgagttaaatgcccctgataggtcaagtaagatgacaaccaagaactgaccattgcatttaataacatgaaggctaattggtgaccttgaactgaatgattttgggagtggtgcctcagtggaactggtgaaagtctaactagagtctttctaaaagagaatgagaggagagaaattgagagaaaagagtataagccattttttggaattattttgtgaagggagaggagaggagaaactgattcaaaggatggcttttaaaggaaagacaaaataactgtatgtttgtatgctggagagagggaaaaatga

SEQ ID NO: 4101 - DNA, 661 bp, Homo sapiens
  SYT9
  misc_feature [331]..[331]: Chromosome 11, SNP identification no. = rs12576021
  misc_feature [331]..[331]: allele = g, in linkage disequilibrium with rs7126337, respectively
  misc_feature [331]..[331]: n is a, t, c or g
aactaggccatgaggttagagaataacatggttgcttgattcctgtaggctataaatcatcctagccaatatgctcacttcttgtcagaaaaacctgtgaaacagagaaagaagctggacaagaatgaggaggccacattagaatcacttttaacttgggattcagaggatcccaagttaaacatatttccattcttatttttttagataatatggatgtcaattgttggcatagctgagctagctctgaaggcttcccaaattatttcagagggaatgagaaaacagtgctgcttgctcttctttaatctgttccaccgtgactgctacnttagatttaatataactgtaatatcccgaatttataggtcatccttcttctggggcttttaaagtactttgtgtgtattactttaattttgagggaactcagattcatcatcttatggaatctatttcagagggaatctacaaagagaactagaaagtcccccaaagtgtttcttttttttcttccagatgcctttggtaggaacattcattgattctaactccacactgctttagaggccatttatgtgtggattactgtaggctgctctgggggaaaatctaatccccacaggttcagttagagaggatccactctgcacgctgataa

SEQ ID NO: 4102 - DNA, 661 bp, Homo sapiens
  SYT9
  misc_feature [331]..[331]: Chromosome 11, SNP identification no. = rs10839754
  misc_feature [331]..[331]: allele = g, in linkage disequilibrium with rs7126337, respectively
  misc_feature [331]..[331]: n is a, t, c or g
gaatttataggtcatccttcttctggggcttttaaagtactttgtgtgtattactttaattttgagggaactcagattcatcatcttatggaatctatttcagagggaatctacaaagagaactagaaagtcccccaaagtgtttcttttttttcttccagatgcctttggtaggaacattcattgattctaactccacactgctttagaggccatttatgtgtggattactgtaggctgctctgggggaaaatctaatccccacaggttcagttagagaggatccactctgcacgctgataaagattaaaactgcagctcttttcgattncattgtcttctttttttatcttttaatttttgtattatcttatgcttcagtaattcaatcacatctgccttcccagtgcctcagtatgtggaaactgggaagttaaattgggcagagtaacaaaacaggagctctacttcatatgcctttgttgtaaaatgtgatgtcttagggtttgcagtggtgtcccatagtgctacagacaatcatcagatttgacccagggaaactcctggagaaaagtgagtagtaaatagtggccttaatgatgcaatcagaacatgggggattgtcagaagaggatcagagttagctttgtagtacttgatt

SEQ ID NO: 4103 - DNA, 661 bp, Homo sapiens
  SYT9
  misc_feature [331]..[331]: Chromosome 11, SNP identification no. = rs10839755
  misc_feature [331]..[331]: allele = c, in linkage disequilibrium with rs7126337, respectively
  misc_feature [331]..[331]: n is a, t, c or g
ctgctttagaggccatttatgtgtggattactgtaggctgctctgggggaaaatctaatccccacaggttcagttagagaggatccactctgcacgctgataaagattaaaactgcagctcttttcgattgcattgtcttctttttttatcttttaatttttgtattatcttatgcttcagtaattcaatcacatctgccttcccagtgcctcagtatgtggaaactgggaagttaaattgggcagagtaacaaaacaggagctctacttcatatgcctttgttgtaaaatgtgatgtcttagggtttgcagtggtgtcccatagtgctanagacaatcatcagatttgacccagggaaactcctggagaaaagtgagtagtaaatagtggccttaatgatgcaatcagaacatgggggattgtcagaagaggatcagagttagctttgtagtacttgattccttaaatgtttaggaagtagtttcattaaatatagtaaaacatttgtctactgatttatatagtttttaatcttctctttttccaaaacctcatgctaattaaattaacattcctataaaaaacatactgaatacaatatatatcattaagtgagacttattttaggttcataaatagtacaataaactgtaaagactt

SEQ ID NO: 4104 - DNA, 661 bp, Homo sapiens
  SYT9
  misc_feature [331]..[331]: Chromosome 11, SNP identification no. = rs2200649
  misc_feature [331]..[331]: allele = a, in linkage disequilibrium with rs7126337, respectively
  misc_feature [331]..[331]: n is a, t, c or g
ttaaaaaattaatcagcacatgattaattttttagacatgacaataaaaaggaaaagttaaatccaacaggtaaaaatcgcatgggccacatttactgaccataaaataatcagtgagagattaagaagtaacaataacaatgccaaaactctaaacacttaaaaattgaactctttcagagatctcttgagttaaaaaaaatcagaaatggacactgaaattatagacattgagaatacaatggagtataaccaaagctatatctagatgacaatttctaattctcagttgttaatagcaaataaatacagcaatagaaaaaaaaatgcnttgaagttaagagcctaaaaatagaaaggtaaagcaaatcaaaagagaaaaaaaaataagagcaaagcatcaataaaaccaaaagaagaaattactgaattagaaagtgaaaaatcccaaagaagcagtgttaataaataaaacccaggtgtgtctttctgaaataaaaaataaataaatattgtgctattctgatcaaggaaaaaatgagaaaacacaaatataaagcaaaaagaataagaaagaggatttaataacagatacagaagacaatagaaagcacaagaaaatggcatacatgccaatgatgtagaaatacaaattgagtgg

SEQ ID NO: 4105 - DNA, 661 bp, Homo sapiens
  SYT9
  misc_feature [331]..[331]: Chromosome 11, SNP identification no. = rs7113137
  misc_feature [331]..[331]: allele = t, in linkage disequilibrium with rs7126337, respectively
  misc_feature [331]..[331]: n is a, t, c or g
taaaaaaaatcagaaatggacactgaaattatagacattgagaatacaatggagtataaccaaagctatatctagatgacaatttctaattctcagttgttaatagcaaataaatacagcaatagaaaaaaaaatgcattgaagttaagagcctaaaaatagaaaggtaaagcaaatcaaaagagaaaaaaaaataagagcaaagcatcaataaaaccaaaagaagaaattactgaattagaaagtgaaaaatcccaaagaagcagtgttaataaataaaacccaggtgtgtctttctgaaataaaaaataaataaatattgtgctattcngatcaaggaaaaaatgagaaaacacaaatataaagcaaaaagaataagaaagaggatttaataacagatacagaagacaatagaaagcacaagaaaatggcatacatgccaatgatgtagaaatacaaattgagtggaagtcataaacatctcagagtgagtataaaaatatttagaagaaattgaaaggtagtcaaagaactttctgtgtaaaaaggtataggcctaaatatttttataggttaagtttaacaaaatattaagtactacatcagccctcttatttgtcggaaccacaaatagtcattacaaatttgttttaagttgtca

SEQ ID NO: 4106 - DNA, 661 bp, Homo sapiens
  SYT9
  misc_feature [331]..[331]: Chromosome 11, SNP identification no. = rs6578840
  misc_feature [331]..[331]: allele = a, in linkage disequilibrium with rs7126337, respectively
  misc_feature [331]..[331]: n is a, t, c or g
ttgttaatagcaaataaatacagcaatagaaaaaaaaatgcattgaagttaagagcctaaaaatagaaaggtaaagcaaatcaaaagagaaaaaaaaataagagcaaagcatcaataaaaccaaaagaagaaattactgaattagaaagtgaaaaatcccaaagaagcagtgttaataaataaaacccaggtgtgtctttctgaaataaaaaataaataaatattgtgctattctgatcaaggaaaaaatgagaaaacacaaatataaagcaaaaagaataagaaagaggatttaataacagatacagaagacaatagaaagcacaagaanatggcatacatgccaatgatgtagaaatacaaattgagtggaagtcataaacatctcagagtgagtataaaaatatttagaagaaattgaaaggtagtcaaagaactttctgtgtaaaaaggtataggcctaaatatttttataggttaagtttaacaaaatattaagtactacatcagccctcttatttgtcggaaccacaaatagtcattacaaatttgttttaagttgtcattgcaacaaaagttttcagtgagcacaagaattaaaggtcatcagcacttccattaacaattactgttaatacttttaccagaagtggaattgcta

SEQ ID NO: 4107 - DNA, 661 bp, Homo sapiens
  SYT9
  misc_feature [331]..[331]: Chromosome 11, SNP identification no. = rs7946753
  misc_feature [331]..[331]: allele = t, in linkage disequilibrium with rs7126337, respectively
  misc_feature [331]..[331]: n is a, t, c or g
aatataactttatcgagacgtgttttacatattgtagagttcactctgaaagtgtacaatggaattattttttagtaaatgtatgaagttgtgcaagcatcactataaatcagttttagaaccttttcaacattccaggaagtttcctcatatccattctctgttaatccctgcctcaggagactactaatctactttctgtctctattaatgtgtctgttctagacatttcatataaatggaatcatacaatatgtgatgtcttctgtgactgggttccttcacttagcataatgtttttgaggcctggctatatcatagcacgtgtcantagttctttcctttttattactgattagtattccattagatggatgtatttcattttatttattcatttaccagctgatggacatttggcttttttccaattttgtgctattgtgacatggcaatatagtatctggtaaagacagcatttcaaatcagttgggggggtgggaaatgggctattcagcaaatggggttgagataattgagtaactatttgggaaaaaacattatatgcctgctcctgaaatttttcatgtggtttaaattttacaaatataactgctaaaattccaaaggaaattatgtgataatcattttatcatcagaa

SEQ ID NO: 4108 - DNA, 661 bp, Homo sapiens
  SYT9
  misc_feature [331]..[331]: Chromosome 11, SNP identification no. = rs10500688
  misc_feature [331]..[331]: allele = g, in linkage disequilibrium with rs7126337, respectively
  misc_feature [331]..[331]: n is a, t, c or g
aatttaagttgttattttggaaaaggggaaaaacagatatggggtggcaactaccagtgtctgtgatctttgtagtaggtgaagccttccttagcgtgaccctaaagccaaaaaccataaaagacaaggttgacagattctgagaagcacaacagcaggaacatttttattttgcaaagttcattatcagcaagacaaaccaaaaatgggacaaaataataacaatgaatgatagagaattaacattcttaaagtgtactgctgaaatacattaattagtaagacatttgactgtctgtgccttttggagagagtgtatcaattctttggnaactccttaaatgtacaataataccatattgacaatgtttattcttattatataaatatatattttaaaccatgttgaccttttagcaagaaggtacatttttttgtatggggcattattattttaattctctcccctcaagggcacattttaggctcatctgttaaatgcagctcataaacgctgttataggctgtttgatttaggacagattcagctagattacctgaatactcaattaactgccacagtgagaatcgtttgctttcagatcgataagaagatcaaatcagtagccattctcagttcagtgcttcatcaggaagtgaa

SEQ ID NO: 4109 - DNA, 661 bp, Homo sapiens
  SYT9
  misc_feature [331]..[331]: Chromosome 11, SNP identification no. = rs10431020
  misc_feature [331]..[331]: allele = a, in linkage disequilibrium with rs7126337, respectively
  misc_feature [331]..[331]: n is a, t, c or g
ttctgttaatatcttctgatttaacaggcaagttggagccaagtggcctttggctatttggtatccttggtaaccactgttagatgatgaattgaattagttaaaattaatttcttgtgaaaagctgcttccatgagaggatactgactttgatgtttagatgcacaagacacagacacacacacacacacacacacacacacacacacacacacataatgtggagagagtgtcatcaggtgtggagagtttttgcaggtaactgcaaagcctaataaatgtaaaagtgagaaagacgaaggaagactgcaaagggctctgcctctaaganctgtgcttctgcttggagagggaagacttatataaataaaggaatctgaagcataatagtcactattatttggctggtgaagtagcctttcttttctcacatctgcgaatgttaactgtcatgacaaagctattttattgttatagaagtttgggaaaagatggagaacacattttttcaatataaaataatataatatatattttggctccaagcccacttttgatgtcaatttaggtagcatttttctttcatcctgataggtgcctaacctgaggaccatatctgctacaaactctgcactcccagaagttaacatttttagggtta

SEQ ID NO: 4110 - DNA, 661 bp, Homo sapiens
  SYT9
  misc_feature [331]..[331]: Chromosome 11, SNP identification no. = rs7104910
  misc_feature [331]..[331]: allele = g, in linkage disequilibrium with rs7126337, respectively
  misc_feature [331]..[331]: n is a, t, c or g
tttctttcatgggtttcttttcttctacttgccccttaaatgttggcattttttatattactgtgacccatttcttctgtcacttatgcatttttcccaagttgtcctctccaatcctagaacataccagccttcaatatactgataattcaagattcatattccagcccagactgctgaagttcagacctgtatatctagccacctcctggacatctccatttgcatagatgaaggagcctctaaatcaatgtgtccacaacccaagttcattctggcctttccacttgctgctgttcctccacctgaaatgtttttctcacaggccccncgtggctcactgctcacttcatttatcctctctgttcagtcagcaccttccccaaaagtccccatatgtgccttttccttccctggctttatttctcttcagatcatatgtgtctgaatctatataatatttgttacttgtttattgtttgcgcctcacccccaactagaatgtaagctctatttatctgtcttgttcactattatgtttgagccaatttctggtgtccaaatattaagtgagtgaatacaccatcccccacccccagactgatttctgtatgttttatcttcatgggtgacaccagtcccaccctcagtcactcaggtt

SEQ ID NO: 4111 - DNA, 661 bp, Homo sapiens
  SYT9
  misc_feature [331]..[331]: Chromosome 11, SNP identification no. = rs1487879
  misc_feature [331]..[331]: allele = t, in linkage disequilibrium with rs7126337, respectively
  misc_feature [331]..[331]: n is a, t, c or g
ggtgatcatagggacagagatagaagacagatctgagaaattattacgagataaaactggcgggaactggtgactgttggatatgggaaagtgaggatgtggtgatggtaaaagaagtttctagtataactccaaatttccaacctgagtgactgagggtgggactggtgtcacccatgaagataaaacatacagaaatcagtctgggggtgggggatggtgtattcactcacttaatatttggacaccagaaattggctcaaacataatagtgaacaagacagataaatagagcttacattctagttgggggtgaggcgcaaacaataancaagtaacaaatattatatagattcagacacatatgatctgaagagaaataaagccagggaaggaaaaggcacatatggggacttttggggaaggtgctgactgaacagagaggataaatgaagtgagcagtgagccacgcggggcctgtgagaaaaacatttcaggtggaggaacagcagcaagtggaaaggccagaatgaacttgggttgtggacacattgatttagaggctccttcatctatgcaaatggagatgtccaggaggtggctagatatacaggtctgaacttcagcagtctgggctggaatatgaatcttgaattatcag

SEQ ID NO: 4112 - DNA, 661 bp, Homo sapiens
  SYT9
  misc_feature [331]..[331]: Chromosome 11, SNP identification no. = rs12363517
  misc_feature [331]..[331]: allele = c, in linkage disequilibrium with rs7126337, respectively
  misc_feature [331]..[331]: n is a, t, c or g
caccagttcccgccagttttatctcgtaataatttctcagatctgtcttctatctctgtccctatgatcaccttatttccagccatcagacctctcttctgtcttattgcacctcttaatgtgcttcctgcctcagtttttaaccacccaaatccagcctcaatggaagccagagtggtctttctaaaaagcagatgtgaccctgctgttttcctatgtgaaactcttcagtgggcccattcaactatgggatcaagtctaagctctttagcatgacacgtgagaatatggtggaataaggtggaatgaatctggtggaataaggtgcacnccttgcgttagactaactgcagggtgtgccccacagtttcctgcctccattcttaagctgtcccctcagcctaaaatgattgtctttcccctctgccttccccctcctggtggattctccctcatcattcttttaagcatcagttttggggtcacctaaactccctgtgctcttttgcattttccttagcactgtacctatacttaaaacattatctgccagccaggcacagtggcacatgcctataatcccagcaatttgggaagccaaggcgggtggatcacgaggtcaggtgttcgagaccagcctggccaacatagcgaaacctca

SEQ ID NO: 4113 - DNA, 661 bp, Homo sapiens
  SYT9
  misc_feature [331]..[331]: Chromosome 11, SNP identification no. = rs960647
  misc_feature [331]..[331]: allele = a, in linkage disequilibrium with rs7126337, respectively
  misc_feature [331]..[331]: n is a, t, c or g
actgagggaaaggactgtgtattatttatctttttattctcttcatctaactccatgactgaaacatagtgaggatttgataaacgtttgaataaatgaaagaataatgaatgacccatcgagatagatttctggctgaattctggtcattgtcatcaagttatggcataaaattacatttccaaaatctgaaaaatattagtgtaatctgcaaaatgtgaattcattatgtgctgtgtgttactgaacattgcattgttgcttttcagcaagtgctcatgtcttactttccctgttgtcctattaagttcaaaagtcgacttaacaaaanctaaacagaaaaaagagaatgggggaataggaacaagagaagattacatccatttttttttgtcttatgaatttgaagcattttctcaaatgtgaagaaaagggcactttttcagcagtaaagtaattgtgtttttattataaagtgtattatgttaggcatgtgggcaatatgactcaatgaatagttcttcaggattagtgtatgcctagttgaaacttaatgctctttccctcagcatgcatgtaggatctgaattttcactgtgaaagcaaatgctcctgttggagacctttatcatcaacttgttggaattcatgcctagaatat

SEQ ID NO: 4114 - DNA, 661 bp, Homo sapiens
  SYT9
  misc_feature [331]..[331]: Chromosome 11, SNP identification no. = rs960646
  misc_feature [331]..[331]: allele = t, in linkage disequilibrium with rs7126337, respectively
  misc_feature [331]..[331]: n is a, t, c or g
tgactgaaacatagtgaggatttgataaacgtttgaataaatgaaagaataatgaatgacccatcgagatagatttctggctgaattctggtcattgtcatcaagttatggcataaaattacatttccaaaatctgaaaaatattagtgtaatctgcaaaatgtgaattcattatgtgctgtgtgttactgaacattgcattgttgcttttcagcaagtgctcatgtcttactttccctgttgtcctattaagttcaaaagtcgacttaacaaaatctaaacagaaaaaagagaatgggggaataggaacaagagaagattacatccattnttttttgtcttatgaatttgaagcattttctcaaatgtgaagaaaagggcactttttcagcagtaaagtaattgtgtttttattataaagtgtattatgttaggcatgtgggcaatatgactcaatgaatagttcttcaggattagtgtatgcctagttgaaacttaatgctctttccctcagcatgcatgtaggatctgaattttcactgtgaaagcaaatgctcctgttggagacctttatcatcaacttgttggaattcatgcctagaatattttaagttgaacaattctatcacagtggcatgcatagattgctgagaaaggcaca

SEQ ID NO: 4115 - DNA, 661 bp, Homo sapiens
  SYT9
  misc_feature [331]..[331]: Chromosome 11, SNP identification no. = rs1395910
  misc_feature [331]..[331]: allele = c, in linkage disequilibrium with rs7126337, respectively
  misc_feature [331]..[331]: n is a, t, c or g
tacaggagtttgacaaaaatcaagaaaagcattctgtgagaatcaattgtaatgtaatcaataaaatgcaatgtgtattttattatgaattgtgcaccgcacagcatttatatgagtaacacttaaaataaacgtatgcgtgtatatttatgcataccttttctattctggagaattagttgtttacagatgtactgatacatccctgcccccaatccaggcagcatggagactgagtttctcaaggaattgtgtagaactaagtttctttcagtatgcctcattgctcttcacctaaggtctttacctgatgcaaaatcccattttactnctcaaaagatttgcctcatcagctctgcttttgcagcataagtggctgtcaccagatggcatttgggttgggcttgacccagggcaattagatgtagaggaagatcagaaatttctgggtcacaatcatatataaaaaatgaacctgcttatgaaacaactaaagactttctctgtttctctaactgggtagctttcctcacagcaaataatcttatctttgaagcaacggttctaaaatttatatgtgcttggtaagtatttgggaagcttgttaaaagtatagattcctgggctatgcctccagagatcatgattctggatggggcat

SEQ ID NO: 4116 - DNA, 661 bp, Homo sapiens
  SYT9
  misc_feature [331]..[331]: Chromosome 11, SNP identification no. = rs7120457
  misc_feature [331]..[331]: allele = a, in linkage disequilibrium with rs7126337, respectively
  misc_feature [331]..[331]: n is a, t, c or g
cattatttaagccctgtgcaccatgttttccaagtgataaatagcaagctatgtgttcccagtagagagaagcatcataacgtcatggcagatggcagagatgctccctacacttagctttataggattatccaagggtcttctgacacagactcctagaggcacaatagtgggaaataagtatgtaactgtcaggggcctgggaaaccctgggagggaccccagactcttgaggtggaggggcagtactccatagaagtactttgacagaagggtttgaaagggactatgtacctggctattgttggtatttggtaaaactatggcattntatgtatttgtaaaaaaaaaaaaactcttcatctaccttccccttccttagttgattttcttctcttatatttttatgataatgtctcatcctttctaatacctcttatttctgttccatttattattatctaacccaaatatctttcagaacatcacccaaatgtcttccagaacttcatgcccttttgggcctgatacattagcactggatatctaggcctactggatcattaccccttatctgtccacagataggaaggacctctgtcctactacttcttttgttttcctgtgagtcccccattggggatatggtggagaataacat

SEQ ID NO: 4117 - DNA, 661 bp, Homo sapiens
  SYT9
  misc_feature [331]..[331]: Chromosome 11, SNP identification no. = rs4758170
  misc_feature [331]..[331]: allele = a, in linkage disequilibrium with rs7126337, respectively
  misc_feature [331]..[331]: n is a, t, c or g
tccatatgtacctttgcaaggcaaagatcctatctagggaccagatttcagtaaaatgagacaacttggtttatcatagaaacagaaaatagaccagtggttaccagggtctggaggagggagttagtatttaataggtacagagtttcagcatgggatggtgaaaatgttctggagatggatagtggatcaccactaccacagcacaacaggataaatgtagttaattaccactgaactatactttaaaatggttaaaatggtaaatttgatgttatgtatattttgctacaatttttaaaaacatgaataaaaaactctacttggtttnaagagaagtgaagattacagaaatgtcttaggaaaaacaacactgcctgctcatagctatagctcggtccactgcctgttatgcagaatttctgtaactcagagagggcaggcctgaggagaacatttttgaaaagaattggtattctttgtatcttctagtttgatttaagagtaaactgtgttgtaatcttaagtattatttttctttattgatcaatgatttttagaacaattactacatttcttggtcatatggcattgttaataatcactctaatgagtaaatgccaattgctatgcatgactactgataaaaattaacaattta

SEQ ID NO: 4118 - DNA, 661 bp, Homo sapiens
  SYT9
  misc_feature [331]..[331]: Chromosome 11, SNP identification no. = rs10839757
  misc_feature [331]..[331]: allele = a, in linkage disequilibrium with rs7126337, respectively
  misc_feature [331]..[331]: n is a, t, c or g
gaaacctgaccatgctttcagcacagacagatccgtgatctggggtgtagaggtgggtttcaggtataacagtacaagtagtaaggagttttacattggaacaaagtctgtgcttttaaccacagacaagggttcaagacagacaaatgaggaaaaaaatagggaaaattttgaaccaggagtccactctctattctgacactaggcaaccttgtagcttggaagtatttctcaggagagactcttttaaagttaatattgaccatagaagcaagactatttggaactatcatcaggcactaagaacttctgaagattcatttccctgaancagtctggatgggccactccagccccagttatataatacctcgatgagcagcagctcaatacaacatgttgtgaggttaatttaatacatgatgcttgtcccagaaccaatgctccttctactatactgctctgcctgcgtggagtcttaaatgtttagagaagcatgaaacactgtatcattttcaatcatgatgaaaatgtaatcttaatgcctattgtatatgtatatatacttaaacacacagcttctttgccaattctttttcctaaatcacatttttagtggagtaaggaatagttataaaatagaaatgttatgtagcttaga

SEQ ID NO: 4119 - DNA, 661 bp, Homo sapiens
  SYT9
  misc_feature [331]..[331]: Chromosome 11, SNP identification no. = rs1487875
  misc_feature [331]..[331]: allele = t, in linkage disequilibrium with rs7126337, respectively
  misc_feature [331]..[331]: n is a, t, c or g
cctgttgcacctgagtccccacttgctgcctaacaggaaggttcaggaatcattattaggtttgctactgggtttctgctttctttttactcgattgctccagaaattatttaattgggggaaaatctacttaaaaatattttacacccacataattggaagtgcttgcaaaatctacaatgttttctacaccattggattctggcctgtgcagtgtaaatggaaacactcagatgtgctaggattcttgtgaaattacagaaaatctgatgtgcagagttttagaccattgagactttttgctgaaaagaactgtgaaacgaaactcaanaacatgtagggactggggacaggccaaagaggtcaacaaccctctggtgtgtccacaggaagtgggatcccaacctgccctgtagggctgtgtggagttggaggggaatgggattcaggaaatggagaccagctttgtggcctgctgtgagactttgggccgcctgcaccctctcctgggccatttctcacctttacaatgggggaagagattcctcctagcctggctatgcacttgcatctgtataaaacctgtcacagtgctttcatagtgttggctgaaattctttttaagcttggcactactgtattggctcaaatctttacactt

SEQ ID NO: 4120 - DNA, 661 bp, Homo sapiens
  SYT9
  misc_feature [331]..[331]: Chromosome 11, SNP identification no. = rs4758171
  misc_feature [331]..[331]: allele = a, in linkage disequilibrium with rs7126337, respectively
  misc_feature [331]..[331]: n is a, t, c or g
cctgtccccagtccctacatgtttttgagtttcgtttcacagttcttttcagcaaaaagtctcaatggtctaaaactctgcacatcagattttctgtaatttcacaagaatcctagcacatctgagtgtttccatttacactgcacaggccagaatccaatggtgtagaaaacattgtagattttgcaagcacttccaattatgtgggtgtaaaatatttttaagtagattttcccccaattaaataatttctggagcaatcgagtaaaaagaaagcagaaacccagtagcaaacctaataatgattcctgaaccttcctgttaggcagcnagtggggactcaggtgcaacagggttatggacacaagaacttaaatctggctcttagggtatatggctccaggctgtcagtgtctagcttcagcacccctgccccatccgggcaatgcaggggtggtgatgccagtgtgaagaggaactggtcacgctgatgagacagcactttgcaaatagaaggtataacagaaagtgttctctcaatgctaattttaggccagctccttagttaacataggcagaatcatctgggcagccttctgaggaaggaatcagagagccagaaacagtcatatttcagatgttcttccctctgtgtcagtca

SEQ ID NO: 4121 - DNA, 661 bp, Homo sapiens
  SYT9
  misc_feature [331]..[331]: Chromosome 11, SNP identification no. = rs12796904
  misc_feature [331]..[331]: allele = c, in linkage disequilibrium with rs7126337, respectively
  misc_feature [331]..[331]: n is a, t, c or g
tggatgattaagtttgtggttcatacctatactaatctcttaaatagtcagttggccacactgttagtgttctcttccaaacgtgggttctcattttttgcaatgtggatagactgagaattttctaaatctacaagttctcattctgttttgcttaacaattctgtctttaagtcattctgtctttcattttactataagcagctaggaggagccaagctgcaccttcaaaactttggttagaaatagcttcagctaaatatcccgtttcattgctcccaactaaatatcctgtttcattgctcccaagttctaccttacacaaaacagnagaacataaacacaattcagcaaagttatttgcctttttataacaaggatcacctttcttccagtttctaataatatgttcttcattcctctctgagactttatcagaatggtctttactgttcatatactaccaacattctggtcatgggcacataagtattctgcaagaagcttgaggctttctctacagctctcctcttttctttctgagcctgcaccagaattgctcttaatggtccattcatggcagtgtaagctttttcaagcatgcacctcaaaattcttccagtttctacccattacataatttcaaaactgctttcatatt

SEQ ID NO: 4122 - DNA, 661 bp, Homo sapiens
  SYT9
  misc_feature [331]..[331]: Chromosome 11, SNP identification no. = rs6578844
  misc_feature [331]..[331]: allele = a, in linkage disequilibrium with rs7126337, respectively
  misc_feature [331]..[331]: n is a, t, c or g
actattattatcccaatgttactttgacaagacaagatacagaaaatttatctatggttacacaatgttaaaatgcatatcttgactgtataattctataacctgtgtttacagctactgtgctatggtgcctgaagtataattaaataacaatgttttggcaatattgcatttcccagacaacttaagttcaatcatttaaacaaaaagtatctgatttaaactagaatctattacatgcttcttattcaagatgttgcaggatcaccactcaggatgccctctggcctgttgaggtgtgtatggatctaagttctccttcactggatanttccagaatgttatgatgcttgaactcaacaatttctcctccttcctctcctcttcttcctccttcttcttcctgtgtctctttctttttatttaaatatactttaatttttagagaagttttagtttcacaggaatattatctttttaaattgcaaaagagagacacattcattttataaagtttaaaaatacagaaaataagatattaaataaaggctttgtatttacgtgaaagggatattgatgaggtaattgtggcatgaattgttctggattatcagtaagatttcattgtgttcattcttaatacaatgtttcctcattggtt

SEQ ID NO: 4123 - DNA, 661 bp, Homo sapiens
  SYT9
  misc_feature [331]..[331]: Chromosome 11, SNP identification no. = rs6578845
  misc_feature [331]..[331]: allele = t, in linkage disequilibrium with rs7126337, respectively
  misc_feature [331]..[331]: n is a, t, c or g
ctccttcactggataattccagaatgttatgatgcttgaactcaacaatttctcctccttcctctcctcttcttcctccttcttcttcctgtgtctctttctttttatttaaatatactttaatttttagagaagttttagtttcacaggaatattatctttttaaattgcaaaagagagacacattcattttataaagtttaaaaatacagaaaataagatattaaataaaggctttgtatttacgtgaaagggatattgatgaggtaattgtggcatgaattgttctggattatcagtaagatttcattgtgttcattcttaatacaangtttcctcattggttcagcaaaatctgaaacacttaacatcagagctgtctggtcccacctgtttccactctctaattacattaccaccttccctacaaagcaccattgatatcctcaagttctccatgggctgattttctaactaaatttcccagtattatatttattagccctccccctgacacacacacaatcatctgaggatcaggaaaatgtcttgtattctgaaccacggtgtgtgtgtgtgtgtgtgtgtgtgtgagagagagagagagacagagagagagagagagagagagagatcagatttattcagagttgagatgctt

SEQ ID NO: 4124 - DNA, 661 bp, Homo sapiens
  SYT9
  misc_feature [331]..[331]: Chromosome 11, SNP identification no. = rs1319309
  misc_feature [331]..[331]: allele = c, in linkage disequilibrium with rs7126337, respectively
  misc_feature [331]..[331]: n is a, t, c or g
ttaaattttttacttgttggccagtaatcaccgtcactctaatacaggtccactttttttttaatgcttgcaggaatcctctagtattacaggtgtccagctggaatgtctgctgggtctaaggtgtcatgggtgtcttctatctggtgtgctagggatgttgctacaatgcatcacgtcttatggctagagctaatagccagtagaagaggtttctgacaaacaggcgtgattacagggcatctatgccacatcttccctgggaagaatacactccatgcagctctgggtatagttttatgcacggtcacccccaaaacagcaatacttntagggatttggatcagaactggtttgccatttgcctcttttcttccttgagggactatctggctattacctcaactcttggataaaagcactaattatgctattcctgttctttagaaaaattatgtcacgactatttttaatgtcatatatttttcaatttttaaaatgagatataccataaatgacaataatatatctcatgaacacatgtaaaaattaataataaaacaaatggtcatgtttctaccacctaacttaagaaataacatcttgtgattctaagctgatgctccctctccatttttggaggtcatgggtctgaggtggg

SEQ ID NO: 4125 - DNA, 661 bp, Homo sapiens
  SYT9
  misc_feature [331]..[331]: Chromosome 11, SNP identification no. = rs7947110
  misc_feature [331]..[331]: allele = t, in linkage disequilibrium with rs7126337, respectively
  misc_feature [331]..[331]: n is a, t, c or g
ttttaaaatgagatataccataaatgacaataatatatctcatgaacacatgtaaaaattaataataaaacaaatggtcatgtttctaccacctaacttaagaaataacatcttgtgattctaagctgatgctccctctccatttttggaggtcatgggtctgaggtgggaagtatggccttagtgattccaaagtagctttctagcacctctttctgaaaaaaacaagagaaaggtagaaatgtactatctagaaggcatactcagctatttctaaacagaagtctagacaattatgcttggtgtctggtgtggctgtgtaggtcactantggtgtttcctataggcatttctctctggaccactgctaactcacacagcacctttgtgtaaatcagaaaaaaagccactcctgccatttgctacaatttaaaaaataacaatatgcacaacaatctgtaatgactatgactgtaactggtgccccctagagtttacaggccacaacccgcacaaccataattcaaggtagacgtagcagatagtacaggcctcctcagatgggcttcatcacttactgaatgcctattgtgtgccaggaactcttttagattcttggcagtcagtgttgagatggacaagatctctgctcttctggatc

SEQ ID NO: 4126 - DNA, 661 bp, Homo sapiens
  SYT9
  misc_feature [331]..[331]: Chromosome 11, SNP identification no. = rs2200650
  misc_feature [331]..[331]: allele = g, in linkage disequilibrium with rs7126337, respectively
  misc_feature [331]..[331]: n is a, t, c or g
agcatcattttcaattctgaatcaaagagccaaatctaaaatatgcctctgtgaggagatgggtagttgtctgccgtttgatttagaagaaatcctcagattttatcactaggatttatcttcagatttaaaacttaaatataactagagctctatttgatgctgtcatagagttcatgcaatgtgcagacttataataaaatcctttcagtatttcaatagctaaagccttttagatagagtctccattgaaatttccattgaaattgccccctatttggttctactctgcatgtaacttttctggtctgagttcctccaatatatggtngtagtactgtgatcttgctagatttgatctggggactctgccataattctaacaaactgatagcaatgatgccactataattatcacaatatttatactgggaaagtatataaatatactgcatagcaataaggatttgcttaaaaaataactgttatcactactgatttgtagaaattgggtagaaggaaaaaaattaaaagggagagtgaaggaattatccctgtaaaatgcactttgtgttcagatttattttagttttgaaggcatgcaattacattatcttttctgatggcaaaaatcaagtttagcaatatctgaactactata

SEQ ID NO: 4127 - DNA, 661 bp, Homo sapiens
  SYT9
  misc_feature [331]..[331]: Chromosome 11, SNP identification no. = rs10769777
  misc_feature [331]..[331]: allele = g, in linkage disequilibrium with rs7126337, respectively
  misc_feature [331]..[331]: n is a, t, c or g
ccacccagagagagaatgggaggtggatgaagctgagagttccaaccccagcagccagcttctctacgacagcattagggtgtggcttattagtagaggagatcatctctcaactttccttctgacccactgtcgttggggtccactttttttcattcactgtgcacattaagtcctgagaacaccaaaatacgggactccccagacctactcagaggactgtctgcttcagtcacagatctctctttgccaaattcctacactccctcaatgtcattgtccttgtcagtcagtggctttgaaattctagacccttgccctgggagcctcncatttactgcactcaaaaccacctccattaaccatttagagccacctcacctggggtgggggaggctcaggtaatggctctatattccgtatctttcctacctcttgctttgggcttgcgttttcttcccacctctgtttgagtagcctatgagaactatagaatattgattttccatttcctccaccccctcttctcctttacgcccctggggcagtctccctgctccacttccttattttcagcccccagacctccagaggttatacagggaggttatgagttaccctggttctctggctcttctaagcttctctcttcttccgtgcc

SEQ ID NO: 4128 - DNA, 661 bp, Homo sapiens
  misc_feature [331]..[331]: Chromosome 11, SNP identification no. = rs7121343
  misc_feature [331]..[331]: allele = c, in linkage disequilibrium with rs4922675, respectively
  misc_feature [331]..[331]: n is a, t, c or g
caggaggcaccattcaagccactacggtacaatagtttactaaatctaaatatttctggtttaaatgttaaattttataaggtacataaaaagatcagagctgggtgaagattgaattgtgggagagaaaagcctggagatagaaaacaaataagaattcaagtacaataatgaaaacaatttaaacatgggaaactaataatattggaactagaagggggctaaatgtgagccatttaacaaaaatattttacaggtttagaaaatgtttgggaaaggccactaacaaaactatcacggagcataagcatatttgtaaacaaagctaacntttgattttgaatatgccaaatttaacttttaaagagaaatgttgacttttcacttctgttcactacagctttcattatcaatgcatttttctacccgctctcagtccctgttcatgaattttggtgaaggtttctctacatttaggggcattgaataaagaagcagaattaatattttaccaatatattctgaacttgaaaaatgtagtttctggcatttttggatctttttttttttttttttttttgatgcttctctaagttgagtttctcaaaaactgacaatagaatgaggacttgagttaagtaattcatgaaggaagtgctcc

SEQ ID NO: 4129 - DNA, 661 bp, Homo sapiens
  misc_feature [331]..[331]: Chromosome 11, SNP identification no. = rs7105602
  misc_feature [331]..[331]: allele = a, in linkage disequilibrium with rs4922675, respectively
  misc_feature [331]..[331]: n is a, t, c or g
agctgggtgaagattgaattgtgggagagaaaagcctggagatagaaaacaaataagaattcaagtacaataatgaaaacaatttaaacatgggaaactaataatattggaactagaagggggctaaatgtgagccatttaacaaaaatattttacaggtttagaaaatgtttgggaaaggccactaacaaaactatcacggagcataagcatatttgtaaacaaagctaacttttgattttgaatatgccaaatttaacttttaaagagaaatgttgacttttcacttctgttcactacagctttcattatcaatgcatttttctacccnctctcagtccctgttcatgaattttggtgaaggtttctctacatttaggggcattgaataaagaagcagaattaatattttaccaatatattctgaacttgaaaaatgtagtttctggcatttttggatctttttttttttttttttttttgatgcttctctaagttgagtttctcaaaaactgacaatagaatgaggacttgagttaagtaattcatgaaggaagtgctcccataagaaactattagaggagtgaagaaagcaggagagaggagagaaatctaaacagtttttattttcagcaaaatcttaccctcagcttcatcatgc

SEQ ID NO: 4130 - DNA, 661 bp, Homo sapiens
  misc_feature [331]..[331]: Chromosome 11, SNP identification no. = rs1317037
  misc_feature [331]..[331]: allele = t, in linkage disequilibrium with rs4922675, respectively
  misc_feature [331]..[331]: n is a, t, c or g
gtgggtcacagaattgcagagataactatagaagactcaaacttgtgactgtcttcgaaggtctgcttttcagctattctagtcacatttattatatttattatacatgcagagatgcagaattgtctgagtttgtgctaatctagagaagtccttagccaagagtgtcttggatttgggactaaatctaaaacaaaatttacagccagaagtccccagcatgatgaagctgagggtaagattttgctgaaaataaaaactgtttagatttctctcctctctcctgctttcttcactcctctaatagtttcttatgggagcacttccttcntgaattacttaactcaagtcctcattctattgtcagtttttgagaaactcaacttagagaagcatcaaaaaaaaaaaaaaaaaaaaagatccaaaaatgccagaaactacatttttcaagttcagaatatattggtaaaatattaattctgcttctttattcaatgcccctaaatgtagagaaaccttcaccaaaattcatgaacagggactgagagcgggtagaaaaatgcattgataatgaaagctgtagtgaacagaagtgaaaagtcaacatttctctttaaaagttaaatttggcatattcaaaatcaaaagttagctttgttta

SEQ ID NO: 4131 - DNA, 661 bp, Homo sapiens
  misc_feature [331]..[331]: Chromosome 11, SNP identification no. = rs7930527
  misc_feature [331]..[331]: allele = c, in linkage disequilibrium with rs4922675, respectively
  misc_feature [331]..[331]: n is a, t, c or g
gattctaaaaaccattaacataatttcatacttttcttattctactctatgaagaaaacaatttcaaaataatgatgcttatgacagttttaagcagttcacatagttgtatacatattattattatttgcaccttgcataatggtagatttctagaaaatacaatctatcaaatgctctcagcaaaagtatttaataagaaaaaaagaaagtataaacgaaagggagaaagagaaggaggtcatggtcttaccttgaagtaacatactccatagtaagaaaaacttacactcaactaagtattgcacaaggaaaaatgcaataagagganagtaagaaaatatagccaaaatactataggagaaaaagcaagtggttatgacttggagtctggggatatttttacatcattgtggcttagcattaaagaatgagaagcacttctaaggtactgagacatcagcacttctaagaataactgagacatcattctatactgaaattattaagtttatagtcaaagtcaaactaaataatttacaaagtaaatataatggcactataccttatttttgtcctgatattaaacatgaattatattatggtagccttacttttacttaactggagatttagatggtgactgcatttaattcccatg

SEQ ID NO: 4132 - DNA, 661 bp, Homo sapiens
  misc_feature [331]..[331]: Chromosome 11, SNP identification no. = rs10767161
  misc_feature [331]..[331]: allele = c, in linkage disequilibrium with rs4922675, respectively
  misc_feature [331]..[331]: n is a, t, c or g
ttgaaatgatacattccaaaattgtgacagtgaaattgaaatgtgatgaaaaataatgtaaatgattgattcttaaggcacagacattaatgattcacaatgagctctataattcacagaactcaatgatatgcagaaaacaaatatatggtaggtgtataatttcctcttccaaggaagataagacctatacatcaaagtgattcaccccaaaataacaaattaagatagcattttgttgtattaaaaatgtaatgtatgctttctgaaatgattttcttctttgataaatatatatctagcaaaaaccaaaatgtgtgaagttttatgnataataacagaactccaatttcggtctctaatgttaaacctgcaacaatagactccattattctaaattacacttccatacataaggcatttatacctactttggtatggcataatagaatgatgttagtcatttatttctgattctttctttcacatattaatgaatgatttcaatgattctctagattgtatccaaggtgattttagctacttgtaacagaaaatattccatagtggctttgacaattggtttaggtggcttcatgtaacaagaattagaaagaagtcagttaggttgagacaatcaatcattttattaggaacccat

SEQ ID NO: 4133 - DNA, 661 bp, Homo sapiens
  misc_feature [331]..[331]: Chromosome 11, SNP identification no. = rs10767162
  misc_feature [331]..[331]: allele = c, in linkage disequilibrium with rs4922675, respectively
  misc_feature [331]..[331]: n is a, t, c or g
ttcctcttattttcccccttttgatttttagtaaaatgacttattctccaaagtcacatgctaattggtgtttaccaagcattcattattcccacccaaagaagggaagcaggcatataaggcgaagtaaaatcgccttgatgactacttttatttaaaaaaaaaaatcgggaagtccagagttttttctgaaactacatctagacatctaatacatatctttggtaaaaactatggaaattggctatacctacctacattggagtcttagaaatgaagtctatagttgagctaactactatctaaaacaaaatctaggttatataagtanaaaaaggagtacaaggatactcagtagaaaaacaaaaacaaacaaatgaacaaacaaaaaaaacacaatgcccaagtcagtaacctgagtaatactatggactccatcaagcttacgtgaatggagagacatgctctgttgatagatcaaaatatttcacatgactaatatgtgaattacctccaatttgtccgataaatataatgcatacaaattgaaatttcagtaaaattgtaagatatcacttcacacctgttggctgttatcaaagggacaagagataaatgttggcaaaagcgtagaaaaaaaggaaattctagtacactgttg

SEQ ID NO: 4134 - DNA, 661 bp, Homo sapiens
  misc_feature [331]..[331]: Chromosome 11, SNP identification no. = rs10767163
  misc_feature [331]..[331]: allele = t, in linkage disequilibrium with rs4922675, respectively
  misc_feature [331]..[331]: n is a, t, c or g
ctatctaaaacaaaatctaggttatataagtaaaaaaaggagtacaaggatactcagtagaaaaacaaaaacaaacaaatgaacaaacaaaaaaaacacaatgcccaagtcagtaacctgagtaatactatggactccatcaagcttacgtgaatggagagacatgctctgttgatagatcaaaatatttcacatgactaatatgtgaattacctccaatttgtccgataaatataatgcatacaaattgaaatttcagtaaaattgtaagatatcacttcacacctgttggctgttatcaaagggacaagagataaatgttggcaaaagngtagaaaaaaaggaaattctagtacactgttgacagaaatttatactagtatatccattatggaaaacagtatagaggttcctaaggaaatttaaaatagaattaccatatgacccagcaatctatcttctgggtttatcccaaaacagatgaaaccaccatcgtctaaatatatctacactcccatgttcattgcaacattcttcaaaatagtcaagatatgaaaacaacctgaatgcttattgatggaaaaatagataataacacatggtatatatagaaaatgaacattatttagcctcagaaaagaagatcttgccatttgacaca

SEQ ID NO: 4135 - DNA, 661 bp, Homo sapiens
  misc_feature [331]..[331]: Chromosome 11, SNP identification no. = rs6484010
  misc_feature [331]..[331]: allele = t, in linkage disequilibrium with rs4922675, respectively
  misc_feature [331]..[331]: n is a, t, c or g
aaaatcagtgagatctaaatgtaagattaaaatgataaagtatccagaaataaacatagaaaaaattgtacaatgtcttcaggaaaggatttgttaaacaggacatgaaaaggtaatatatttaaaaaaataataaacttggcttcattaaaacttaaaatttctgctactaaaatatcactgtaaataaagtaaaaaggaaagctacagactggtaggaaatatttttcaaattgtatatatgacagagtacttacatctgggagggaatatttttcaaattgtatatatgacagagtacttacaaaatgaactctcgcttcccttttcnagcttccaggttcccatgcctggcagtaggttttgtagattgctctatgacagaaagatacagtgggattagaacattgttcagagaattaggccaactgaggaaagcagaattaatttaacccataacttaatcaccttcattagaacatacttacaagaaacttcaagttctgattcctaattaacttcagccttatttctcactatctctccatcagactacaggtgaggaattaccattagtgcaacaatttgaacaactattttagaactggatgcaaaatttacctataggtcagtctatcagtgattcaatatccaacaggtc

SEQ ID NO: 4136 - DNA, 661 bp, Homo sapiens
  misc_feature [331]..[331]: Chromosome 11, SNP identification no. = rs6484011
  misc_feature [331]..[331]: allele = c, in linkage disequilibrium with rs4922675, respectively
  misc_feature [331]..[331]: n is a, t, c or g
agactggtaggaaatatttttcaaattgtatatatgacagagtacttacatctgggagggaatatttttcaaattgtatatatgacagagtacttacaaaatgaactctcgcttcccttttccagcttccaggttcccatgcctggcagtaggttttgtagattgctctatgacagaaagatacagtgggattagaacattgttcagagaattaggccaactgaggaaagcagaattaatttaacccataacttaatcaccttcattagaacatacttacaagaaacttcaagttctgattcctaattaacttcagccttatttctcactntctctccatcagactacaggtgaggaattaccattagtgcaacaatttgaacaactattttagaactggatgcaaaatttacctataggtcagtctatcagtgattcaatatccaacaggtctagggatcaacttaatgttatttgtcaacctttgccctcattttagaatctggttcttttggtaccaaaagtataccatcaaatttaggtaattgttgatcagcatgctgcaaacaaagacatctgagtaattttctgaaatgactaaatggtttgggattttatgtatacaatcactgttaagaatgggtaataggatcaaagagct

SEQ ID NO: 4137 - DNA, 661 bp, Homo sapiens
  misc_feature [331]..[331]: Chromosome 11, SNP identification no. = rs2957761
  misc_feature [331]..[331]: allele = t, in linkage disequilibrium with rs4922675, respectively
  misc_feature [331]..[331]: n is a, t, c or g
ccatatctcatttggactatataatccatcaactgatattttgcctattcataatttaatgatttctataatagctttctaacatttatattttagtaaaaaatatataattttatcaaagaaaacacaaattattctattggcatctactgttgtacgtgtaattcatagtaaaaccatgcttttaagaatgtataataatttattgtcatgggactattttacagagaatccctagtataaattttcatttatttttcacagaaaattttaaatgacatgtgttctgaaaatgttatcccctaaagataaataaacacacaaaattganttctctctgaccattatttagagaacatggacatttgagatatatgaggaaaactagaaaaactaatttcaccactagctaaataacctacattgagactgacataacacacttctcagaataatcctcagtatatgaacatttttttcccagttttaaacaatatctgttgaagtcaaaggacattataaagattataaatagtgtgaaaagaaacatcaagaaactggcgtaaggaaaagtgttctttccgaatgtgtcctgtaaccattttttaatgattttgcacaagacatgaacaatattagagaacaaaaacgagtaattatt

SEQ ID NO: 4138 - DNA, 661 bp, Homo sapiens
  misc_feature [331]..[331]: Chromosome 11, SNP identification no. = rs4922675
  misc_feature [331]..[331]: allele = a, t
  misc_feature [331]..[331]: n is a, t, c or g
tgaccattatttagagaacatggacatttgagatatatgaggaaaactagaaaaactaatttcaccactagctaaataacctacattgagactgacataacacacttctcagaataatcctcagtatatgaacatttttttcccagttttaaacaatatctgttgaagtcaaaggacattataaagattataaatagtgtgaaaagaaacatcaagaaactggcgtaaggaaaagtgttctttccgaatgtgtcctgtaaccattttttaatgattttgcacaagacatgaacaatattagagaacaaaaacgagtaattattgagttgancatttaagcatatcagacagttcttgtagagcacagaggcatacttggtactgggctagcagcctttcacacctctgctgtcccaggcaatcacatgttttgctgcatttagaataaactgcatttagaaaatttgaaaggaaatatatattcagggccttcagtatttctgacattacacatacttcagtgtaaaatttagctctcctaatattgctccagaaattatctgattttttatttttatactggcatttaaatgtgtggaatataattatatagaagctacaaaactatcatgatgatcaatagaaatgtaaataaaatgtg

SEQ ID NO: 4139 - DNA, 661 bp, Homo sapiens
  misc_feature [331]..[331]: Chromosome 11, SNP identification no. = rs2860253
  misc_feature [331]..[331]: allele = a, in linkage disequilibrium with rs4922675, respectively
  misc_feature [331]..[331]: n is a, t, c or g
cataaagataagaaagcaaatccaaccaaacatgttaaaaacaacaacaaaacttgaaagtattttgttgtgagggttattagtcaagatagaattattcagatctaattacattctttgaaataaaatgtaaatagagagagatatggatgaataatttttagtttttaaaagtaagaattatttaaaggtttattgaatattcttaataagaaaccatttttaaaaggacaaacttgtttattgtacatttaaaaaaattatcacccatatatggtgaaaataatgtctttttaaatgttgacaaaatgaggtaataggtttttatcantttgaataagactgtctcctacagctgttggattgtcaaactcggttgaataatgacaaaaattcacagtactttgaatgacttatgaaaaataaaaaaaatataaattgagtagggaataattacatagtagagtgccagaataacaaaaatgcatctctggtttccaagaattccggacactcagctaaaaataagaaagctttctttctctggctccgccagtacttcactgcatgtcctctgataaacccacttagtcttccagagcctcattttccttccttgtaaaatgagagatggtgcttgaccaaaaaaatcctcaagtcc

SEQ ID NO: 4140 - DNA, 661 bp, Homo sapiens
  misc_feature [331]..[331]: Chromosome 11, SNP identification no. = rs2957762
  misc_feature [331]..[331]: allele = c, in linkage disequilibrium with rs4922675, respectively
  misc_feature [331]..[331]: n is a, t, c or g
tataaattgagtagggaataattacatagtagagtgccagaataacaaaaatgcatctctggtttccaagaattccggacactcagctaaaaataagaaagctttctttctctggctccgccagtacttcactgcatgtcctctgataaacccacttagtcttccagagcctcattttccttccttgtaaaatgagagatggtgcttgaccaaaaaaatcctcaagtccttctagtatccaagttctcctattttgcattattattctctctactctatgtttccatcttttacctttacttctctctcctcctttttctctctgaatccnctttcttctcttgtccactctttcttccacatctgttcatgtatgtgagggtgagagatatgtgtgtctgtgtctatatctagagaacaagagtgtgcaaaatttcttttgtaacacatatacaatttatttgaaataggttatttttgataactgtattataaaaaatttaaagttatgttagatttagtccttaatataaatgaaatgtgttaaggaaacatttctttcctttcaacttttgtaaattatttcattgtcaaaattaagtaatagagctggtgaatgttctaaaatataattaggaattttttacacttggctcgataa

SEQ ID NO: 4141 - DNA, 661 bp, Homo sapiens
  misc_feature [331]..[331]: Chromosome 11, SNP identification no. = rs10742027
  misc_feature [331]..[331]: allele = c, in linkage disequilibrium with rs4922675, respectively
  misc_feature [331]..[331]: n is a, t, c or g
actgcatgtcctctgataaacccacttagtcttccagagcctcattttccttccttgtaaaatgagagatggtgcttgaccaaaaaaatcctcaagtccttctagtatccaagttctcctattttgcattattattctctctactctatgtttccatcttttacctttacttctctctcctcctttttctctctgaatcccctttcttctcttgtccactctttcttccacatctgttcatgtatgtgagggtgagagatatgtgtgtctgtgtctatatctagagaacaagagtgtgcaaaatttcttttgtaacacatatacaatttanttgaaataggttatttttgataactgtattataaaaaatttaaagttatgttagatttagtccttaatataaatgaaatgtgttaaggaaacatttctttcctttcaacttttgtaaattatttcattgtcaaaattaagtaatagagctggtgaatgttctaaaatataattaggaattttttacacttggctcgataactggatagaaacatacacaatgaaattaaccaaacctaaagaataagtgaattttcattcagtttaatgagtagctaatttaaaatatcaatgttggtaaacaagtgctgaaaatgcaaattttttttcc

SEQ ID NO: 4142 - DNA, 661 bp, Homo sapiens
  misc_feature [331]..[331]: Chromosome 11, SNP identification no. = rs2896685
  misc_feature [331]..[331]: allele = c, in linkage disequilibrium with rs4922675, respectively
  misc_feature [331]..[331]: n is a, t, c or g
gctgggattacaggcgtgagccaccgcacccagcctacaacttttaacgatagttggagagataaaaaacaatacaacaataatgtaagacctcttaaaggaaaactgtataaacaatgacatttaaaatatttaaattaatacaatgataatgaaagaccgcagagtccaactaaatgatttagagtcaaaataaaatttagcctttggatctctatactatataaatgtatacattatctcatagaaagttaagaatcacatataagagagaaacgtaggattttagaaatgaattacttcctcatttttaaaatatacgaaatagggncatgctcttgtgaatcacctatattcccttttcttgaataaatattatactactaaaataccttggtataggtatctatgcttaggatcacactaaacaaatatatcaaatgaaagcttaagtacacattacattttttgtatacctgcccagggcagctccttctctccagccatgattgaaccacgacccatatgtattccttcactttccatttcacttaacaagttccagctgcattgaccattctccaatgctcagtagtgctctaaatctctttcccattaatcaacaatatgaggagggaggcagtattccctaactactctc

SEQ ID NO: 4143 - DNA, 661 bp, Homo sapiens
  misc_feature [331]..[331]: Chromosome 11, SNP identification no. = rs10767165
  misc_feature [331]..[331]: allele = t, in linkage disequilibrium with rs4922675, respectively
  misc_feature [331]..[331]: n is a, t, c or g
attgcattgaatctgtaggttgctttggcagtgtgattgttttaatgatactgattcttttaattcatgataatgtattgtttttcttttgtttgtgtaatctccaatttctttcatcagtgtttgtaattctctttgtacagattttttacctccttggttacaggtattcttaggtttttttttttttgacccttgcaaatggtattgagttatattgatttggttctcagcttgagtgctgttggtgtttagaaatgcaagttattactatatgttaatttgctattgtaaaactttactgaagttgtttatcaaatctagcactttntggagaaatctttagtgttttctaatatcatattaccagcaaaacaaaagatcatttaacatcctcttttccaatttggatgctttttctttcttttcttttgcctgattgctctggttggaacttccagtactttgttgaattggagtggtgagagtgggtatccttgtcttgttccagttcttagtgagatgctttcaacttttcccattccatataatgttggttgtgggtttgtcatagacagctcttattattttaataagtgttccttctatgtctagggtttgaaggtttttattatgaaggtgagaggtgaagacagctgga

SEQ ID NO: 4144 - DNA, 661 bp, Homo sapiens
  misc_feature [331]..[331]: Chromosome 11, SNP identification no. = rs2957764
  misc_feature [331]..[331]: allele = a, in linkage disequilibrium with rs4922675, respectively
  misc_feature [331]..[331]: n is a, t, c or g
gtattgtttttcttttgtttgtgtaatctccaatttctttcatcagtgtttgtaattctctttgtacagattttttacctccttggttacaggtattcttaggtttttttttttttgacccttgcaaatggtattgagttatattgatttggttctcagcttgagtgctgttggtgtttagaaatgcaagttattactatatgttaatttgctattgtaaaactttactgaagttgtttatcaaatctagcactttctggagaaatctttagtgttttctaatatcatattaccagcaaaacaaaagatcatttaacatcctcttttccantttggatgctttttctttcttttcttttgcctgattgctctggttggaacttccagtactttgttgaattggagtggtgagagtgggtatccttgtcttgttccagttcttagtgagatgctttcaacttttcccattccatataatgttggttgtgggtttgtcatagacagctcttattattttaataagtgttccttctatgtctagggtttgaaggtttttattatgaaggtgagaggtgaagacagctggacttcctgggtccagtgacttggagaacttttctgtctagctaaaggtttgtaaatgcaccaatcagcactctgt

SEQ ID NO: 4145 - DNA, 661 bp, Homo sapiens
  misc_feature [331]..[331]: Chromosome 11, SNP identification no. = rs2947727
  misc_feature [331]..[331]: allele = g, in linkage disequilibrium with rs4922675, respectively
  misc_feature [331]..[331]: n is a, t, c or g
atgtttccagaaaattatccatttcctctaggctttctaatttgtgctcatagatatgttcacagcagtctctgatatctttttttaattttgtggtatgagtggcaatgtttcctttgccatttctgattgtgcttatttgaatcttctgtccttttttattggttaatttagtgcatcatcaattttgtttagcctttcaaagggtccatttttcttttcattgattctttgtacattttttggtctcaatttcatttagctctactttgatcttcattgtttcttttcttctgctagctttgtgtcttgtttgtccttgtttatctanattcttcatgtatgacatggggtttttaatttgagatctttccaactttttcattcaggatttcatgctataatctttcctcttatcacagcttttgctgtattccaaatattttggtaggttgtgtctctattttcatttggtcaaactttttttttggtttctgatttaattacattgttttcccagaagtcaactccaaatatatgtttttgtatttgagtatctggttagcttattttgggcttctgttttttactcttttagtaactaactaaaataaggttagttagatttagtgacctaactatgcaaatgcaatcttaatta

SEQ ID NO: 4146 - DNA, 661 bp, Homo sapiens
  misc_feature [331]..[331]: Chromosome 11, SNP identification no. = rs2403894
  misc_feature [331]..[331]: allele = c, in linkage disequilibrium with rs4922675, respectively
  misc_feature [331]..[331]: n is a, t, c or g
aaagagacagaaaagtttttatagaaaacagaaatggaaacagtgtaatcccaaaataaatgtatttcaaaatttgactgtgtgtttaaatttaaatttaaaatttaaaattattgcagcagtaatgtgtctacattatcgctgtaaggatgttggagcttctatggaataaacaggcagggatttcaatcttgttggccacttagtaggtgtgttaccttggccatgcaacatctccatgaacttttgtttccttacaaattaaatggaagtgaggactatgaaaatatgtattataaatgtgatgcaaatgtgtagcactttaaagtantagtttttatcatcatcaggtaatatttaatgataaaactttaagtttgaatactaatagctatattatcattttatttctccatgataatcttgagagagattgtaaataacctgttaaataaatgttaaatattccacttcaattgtaaatgagattttgaacttaataacagcttaggttatatttcaaatgaattgtataatagataatgtcataatgatagtcatagtaaccacacacatagaaggattgagggaattaaatatgccaagtaactttttgcagcatttttcctctgaaccacctgctaaatctgagagaaaggaa

SEQ ID NO: 4147 - DNA, 661 bp, Homo sapiens
  misc_feature [331]..[331]: Chromosome 11, SNP identification no. = rs2403895
  misc_feature [331]..[331]: allele = g, in linkage disequilibrium with rs4922675, respectively
  misc_feature [331]..[331]: n is a, t, c or g
gtaaataacctgttaaataaatgttaaatattccacttcaattgtaaatgagattttgaacttaataacagcttaggttatatttcaaatgaattgtataatagataatgtcataatgatagtcatagtaaccacacacatagaaggattgagggaattaaatatgccaagtaactttttgcagcatttttcctctgaaccacctgctaaatctgagagaaaggaaaagaaaacgagggtaaatttttctattggagcttcctttttccttgttgagtttgataaaattaaatccacagaggtaaaagtattttaagtttgtattaaagtntataaaccatgttttgttttcctatcagtctacagttaggttttgaagcagctccaatcaaaagacaaatttttctgaactacagtgcacctctactctccctttgctctttcttagctttctttccttgtccattccttctccgagctcacagatacaggtattttattacactctgttgtcattcaccccagaagagtaccaggatatatttcaagacactctccaaacttccttgttaatgttttcatcagaatataatgatttcaaactctttgtctagcctatgctattcaacagcacttttatcatctgacttagtttcttccc

SEQ ID NO: 4148 - DNA, 661 bp, Homo sapiens
  misc_feature [331]..[331]: Chromosome 11, SNP identification no. = rs7101630
  misc_feature [331]..[331]: allele = g, in linkage disequilibrium with rs4922675, respectively
  misc_feature [331]..[331]: n is a, t, c or g
taaatattccacttcaattgtaaatgagattttgaacttaataacagcttaggttatatttcaaatgaattgtataatagataatgtcataatgatagtcatagtaaccacacacatagaaggattgagggaattaaatatgccaagtaactttttgcagcatttttcctctgaaccacctgctaaatctgagagaaaggaaaagaaaacgagggtaaatttttctattggagcttcctttttccttgttgagtttgataaaattaaatccacagaggtaaaagtattttaagtttgtattaaagtgtataaaccatgttttgttttcctntcagtctacagttaggttttgaagcagctccaatcaaaagacaaatttttctgaactacagtgcacctctactctccctttgctctttcttagctttctttccttgtccattccttctccgagctcacagatacaggtattttattacactctgttgtcattcaccccagaagagtaccaggatatatttcaagacactctccaaacttccttgttaatgttttcatcagaatataatgatttcaaactctttgtctagcctatgctattcaacagcacttttatcatctgacttagtttcttccctgtgatctttgacatattgcatca

SEQ ID NO: 4149 - DNA, 661 bp, Homo sapiens
  misc_feature [331]..[331]: Chromosome 11, SNP identification no. = rs4360700
  misc_feature [331]..[331]: allele = t, in linkage disequilibrium with rs4922675, respectively
  misc_feature [331]..[331]: n is a, t, c or g
tagtttcttccctgtgatctttgacatattgcatcacaggtcatattgcatcagagtttctgcattagctaagaatatgtgcttccttcactgaaaagaaacttcaaccagtttattgaaaaactattaaattccaaacttcctagttcataatttggacatcattataagctattctcaataacagtatctattcctataaatcaaaatagtagatgctcatatcaattaggtatgtttcttcagttaaattaagacaaaagaatcaagctatgcattgtgctaagcaggggaatgtagaaaaaacaaaggactcattaaatttctaaantgacaaatatgctgatgtcatctaattaattgaagcatacatacaaatttatatgaccttgtaactcttaaagagaaggcttaaacagtattataacagctcttatatgccaatcctgtcagcttgttatatttcttctttagtttattatcttatttgtacctactagcttcacagtacatgtgattcagattcatacattaacaaattacaactccttacctgtggaagatgtttagtgctattttaaaatacaaaaattaaaataattctaagaatgctgagtataggctgagttacctttaatatttttaactgtgtccagaattt

SEQ ID NO: 4150 - DNA, 661 bp, Homo sapiens
  misc_feature [331]..[331]: Chromosome 11, SNP identification no. = rs2403896
  misc_feature [331]..[331]: allele = a, in linkage disequilibrium with rs4922675, respectively
  misc_feature [331]..[331]: n is a, t, c or g
aatcatacttattcattgatttttagtatacattataataaacacataaacttgagttaaaaatggacagccatgtaccacttaaaatcagctcataaggtgcctgcattaatatgctagggctgtctcaacaaagtactattgactgtgtggtttaatcatcataaatttattttcttacaattctgagggttagaatcctgagaccaaattgttgctagggttagcttgttctgagggctgcgaagaaagcatttgtttccagcctctcctcttgacttgtaaatggccatcttttccctgaagttcctcttccttctgttcatgtgtntgtccaaataccctcttagggacacaagtcatattggattaggtcccacaataatggccttgttttaacttaattactactgtaaagaccctattttcaaacatggtcaaattctgagttattggtggttaagatttcagtgtaagacttttttgggagacataattcaacctataaccgagcctaatggaatactttcttgtgtgtgacatgaactttttctttattttgccttttttagactgatggctgtatttggaatgaccttccttctatgtaggaatcgatttctgcatatttcaattttattacacttcaaggaaaaccact

SEQ ID NO: 4151 - DNA, 661 bp, Homo sapiens
  misc_feature [331]..[331]: Chromosome 11, SNP identification no. = rs2947730
  misc_feature [331]..[331]: allele = a, in linkage disequilibrium with rs4922675, respectively
  misc_feature [331]..[331]: n is a, t, c or g
acttcaaggaaaaccactaataatgcccttttacacaatttttctgatccccctatttctttccccacaaaccaaataaatgacgcctctcattctctaaactctaagagtacattagttgcatctctccttaggattatttccctttaacagaagtgcattggtttaatattaaggaagaaattgttttaaagaaaatttgttttataagaggcgtattgtgttcttttcccttcatagaacaattattaaaaggtaatatttctaatatttcaattgaggacaaggagaaataacaacaaaagagagttgtaaaataagagtgacaatnagaaagagataaggaaaagaaggcacttttattttatttatttattttgtttttgagacggagtctcactctgtcgcccaggctggagagcagtggcatgatctcagctcactgcaaccttcgcctctcgggttcaggtgattctcctgcttcagccttccaagtagctgggattacagacatgcactatgatgcctggtagctttgcttgtgcaaatagaaagattaaccacatttctaaatcatttattttctggttttagtcactcattagtttctattattctctccatattgggtttgtgatatagctgaatccttccttaaatc

SEQ ID NO: 4152 - DNA, 661 bp, Homo sapiens
  misc_feature [331]..[331]: Chromosome 11, SNP identification no. = rs7122633
  misc_feature [331]..[331]: allele = g, in linkage disequilibrium with rs4922675, respectively
  misc_feature [331]..[331]: n is a, t, c or g
tactggctgaacgccaactgtgtacaatgtctagtgttagaacctgaatataccacagagctataagacacatagcactgcaataaaaaaaacacagcacatgttaagagagctcgcaaatatatatattcataaatttatatacttataaacatatgtttataaaataaatattcataaaagagaacatgcgataaatatcaaataagtggcttagacacataatgtttacaggagttcagaagatggttcagaatttgtaacatttcaaataggtttcatgagtgaaataactcaagtagacctttggatgaaaggcagtacttattanagagaaagacagttttcaattaagatacaaacagtagcgaaaagtgtggcagcatccatatatccccttagtgcttcagtagaatttgttataactgtatttcagtgctcattattgctagtccttgatatgacccaggttctgatttaccacagcacttaatgtacccttatcaggtgtgctgagttcacatgcaaattactatattcttgccttccttgggaggaaaaaacaacaggatataaaacaatggaagacaagttctactgaagtccataaattccaggctaaaaattaatctgatgagcaataaaattattacagatcttg

SEQ ID NO: 4153 - DNA, 661 bp, Homo sapiens
  misc_feature [331]..[331]: Chromosome 11, SNP identification no. = rs2947734
  misc_feature [331]..[331]: allele = c, in linkage disequilibrium with rs4922675, respectively
  misc_feature [331]..[331]: n is a, t, c or g
atatattcataaatttatatacttataaacatatgtttataaaataaatattcataaaagagaacatgcgataaatatcaaataagtggcttagacacataatgtttacaggagttcagaagatggttcagaatttgtaacatttcaaataggtttcatgagtgaaataactcaagtagacctttggatgaaaggcagtacttattacagagaaagacagttttcaattaagatacaaacagtagcgaaaagtgtggcagcatccatatatccccttagtgcttcagtagaatttgttataactgtatttcagtgctcattattgctagtncttgatatgacccaggttctgatttaccacagcacttaatgtacccttatcaggtgtgctgagttcacatgcaaattactatattcttgccttccttgggaggaaaaaacaacaggatataaaacaatggaagacaagttctactgaagtccataaattccaggctaaaaattaatctgatgagcaataaaattattacagatcttgaggaataatggaaaaaaacttaaagcatgcagaaccctcataaagtcattgcacatatattgttttgagttaaagggtcttctagaatgttgtcagtaggaatacaaggagatgaatttcaaa

SEQ ID NO: 4154 - DNA, 661 bp, Homo sapiens
  misc_feature [331]..[331]: Chromosome 11, SNP identification no. = rs9783297
  misc_feature [331]..[331]: allele = a, in linkage disequilibrium with rs4922675, respectively
  misc_feature [331]..[331]: n is a, t, c or g
tcattgcacatatattgttttgagttaaagggtcttctagaatgttgtcagtaggaatacaaggagatgaatttcaaagtattttaataaaaaatttgcaactttgtttaatgtattattacttaaaatacacagaaaaatgatttgatcagaagacatttttgcaaagatggtgttgtatatagcaggttgacagcatttctttccccgaatatttaatgtaataaaaaattaactaaaactaaccaaaataataacaataataaaacaataagagcaagaatattatgaactaaaaaatatttataaacctatgcctaaacttcttgcnaaggaaataagctgaaaaatgctagtgtatgttaaccttatatagaaaagctgtggtttcaaacaagcagaaactggggaagaaggtaagtcaacaaaatcatcacacttcccccatcaacatagaaaccggtacatgagtcaagggcaaacctttgagaaccttctgcatacctacattgtacctcatcaagcatagaaaaaggccactaagctttccatcttttagggaatagcactgaagtagagaatgggtaaactccattatcagatttgtgaagttagtcctagtacatggcatttcaaaaatcagggacattacagagcccag

SEQ ID NO: 4155 - DNA, 661 bp, Homo sapiens
  misc_feature [331]..[331]: Chromosome 11, SNP identification no. = rs11027722
  misc_feature [331]..[331]: allele = c, in linkage disequilibrium with rs4922675, respectively
  misc_feature [331]..[331]: n is a, t, c or g
gtgagactctgtctccaaaagaaaaaaaaaatactcactcactgaaatccattataccaaatgaagaaatgaaggttatgattgatgggaaattaaatacataagtgaataataaattctatacaagatttctcaatattgccttctccctttcttgtatgaacatgataaatataaatgccatgatgttgcacacattgattattgtttgcctctaatactaccctacactttttcccccactttgcagaaaagcccaatttcactcagaactgccatgtctccaggcctagaaaaataatcatgattgctttaaatcctttgataaggncattttttttccagcttaccttgcacctgggagtcaccatgagactgaagattctctccccatggataaaagaatagccctttgcctatcatacccctgcagaaagaaatataaataaaattatagtattaaaaagtacatatgaatgaagaatagaaattcaacatactttttttttcaatttctacaacctcttcttgctcacacaattgccgaactttgagcccaacatagtctgggtattaaaaagaaaattatagtagatgagagaaagattataccccaatgtcactggctcatctgtagtatctacaatcttgcaaatagtat

SEQ ID NO: 4156 - DNA, 661 bp, Homo sapiens
  misc_feature [331]..[331]: Chromosome 11, SNP identification no. = rs2403900
  misc_feature [331]..[331]: allele = a, in linkage disequilibrium with rs4922675, respectively
  misc_feature [331]..[331]: n is a, t, c or g
ccaaaagcaaagtggtaatggtacttatcatagttagcagaaggatcagatatctaagattgttttattacattgaagagtcaggttttagcttgttgaattagttattccaaatgataaagtcaataggcaaactaataagaatatatgactaacatagcatacctatgacatcagtcactacgctagagggtttggtaccaccattacctgtaacacctagaacaacttgactgaaggtgggtatttctgttctggagaaagattaaaacccacagctatgtagaactattgagtacttaatccagttccatattaagtccaaagaacntggaatactggtccagacagatccatgagagaaattatgggaggactagagataaaattctcaactaagtctacctaacaattgtcccatttagaactaaaaaaaatttataacatcattctctggaaaaatactctctgaattagtttttttttttaatttatggagaattataatatataggaaatgataagtatgataccaagtatatacatcaataaattataacaaccagaacataattttataaaaaattttgtattaaatggacctcaggagctccctttatgcttccctccaattacttctccctccctgtcttaactgatt

SEQ ID NO: 4157 - DNA, 661 bp, Homo sapiens
  misc_feature [331]..[331]: Chromosome 11, SNP identification no. = rs2957766
  misc_feature [331]..[331]: allele = a, in linkage disequilibrium with rs4922675, respectively
  misc_feature [331]..[331]: n is a, t, c or g
tctacctaacaattgtcccatttagaactaaaaaaaatttataacatcattctctggaaaaatactctctgaattagtttttttttttaatttatggagaattataatatataggaaatgataagtatgataccaagtatatacatcaataaattataacaaccagaacataattttataaaaaattttgtattaaatggacctcaggagctccctttatgcttccctccaattacttctccctccctgtcttaactgattttctcactaataatttataattagttattataatagttttgcccattttgtatttttatcaatgtaactnactatataatacatactattttgagtttgtctcctttcaccacgtattatgtttgtgaggtttagcaagattgttgtacatattataaattattctctctcagtatattatagtatttccttgtatgagtataccattaatcaattctatggtaaggagtatttgagtagctttgacaaacccattttataaattggttatactaatttaagttcccacaaaccatgtatgaaagttctgaatatttcacctgttcaactctgatgttcatagtaggaattttcatttagtcatttttgtgtgattgtattggtatatgtatagcagttt

SEQ ID NO: 4158 - DNA, 661 bp, Homo sapiens
  misc_feature [331]..[331]: Chromosome 11, SNP identification no. = rs4293117
  misc_feature [331]..[331]: allele = t, in linkage disequilibrium with rs4922675, respectively
  misc_feature [331]..[331]: n is a, t, c or g
tcatttcccatgataaaagtgttcttactaacccagtggacaagctaacccaatcttcatatatttgtgagtgttcttcactcagcacaggacttaattatctcatgagcaaaacagccagctggcaggaatgtaatccaaacgtagtttcaaacgtggactccctcaacaaggcaccactgattttggtaccatcattattgaaagtctaatttgctacccaaaatgataaatataagtaatatctgtgaaagtatctatgtctacgcacttttcttgtcagtcattccatcacaaagtgttgctgcctccttgggccctacctaggaancaacagataggacttgtctcttttcatctctttctctctctctctgtagctctgtgcagtcttttattttaaggaagtggggcattagcaggaggaggaggcctagtttcactttttatgtttctcccaaatctctctcttacctagagtttcttaaggcttcagaacttcaaaaccaaagccggaaagactcctatatttatttacttcctaccaaatctcgttaccgaagcaatgatcatgaggctgataaaatcttagttggaggaaaataataattatataaatatcataacaatggtattattgtgataacattacccctacacg

SEQ ID NO: 4159 - DNA, 661 bp, Homo sapiens
  misc_feature [331]..[331]: Chromosome 11, SNP identification no. = rs4344486
  misc_feature [331]..[331]: allele = g, in linkage disequilibrium with rs4922675, respectively
  misc_feature [331]..[331]: n is a, t, c or g
aaatatgaattttataaagaaatatattacacttagaaatacaaatatatgtatgtatacatatccccattttaaacagaaattattctcatatgcatctttttatttaaaatatgatttgaaatctttatacaggtagatgtacttttttatatttttaatctgtcttattgtcttatttatgatagataaattcagaaaattttataatacataaatggtagaacaatttatattcctttgggtaaatacctagtaacgagattgccaggtcattacaataagattgttagttctgtttttctttgagaaattttcaaaatacttttcncaatggccgaactaattttcattccaaacagtagtatgtaagcacacccttgtctctgcatccttaccaacatctgctctactattttttgactttttaataatagccattctgactggtgcgacgtggtatcacattgtagttttaatttacacttctctaataattagtgatggtttttttttttcccatgtgcttgttggctgcttgtatgttcttttaagaagtgtcttttcaagcccatttttaaatttttgttttgttttgtttttctcttggtgatttaagttccttatatatagtggttattataacttgtgggatgtatag

SEQ ID NO: 4160 - DNA, 661 bp, Homo sapiens
  misc_feature [331]..[331]: Chromosome 11, SNP identification no. = rs7938053
  misc_feature [331]..[331]: allele = c, in linkage disequilibrium with rs4922675, respectively
  misc_feature [331]..[331]: n is a, t, c or g
tttctctattgcttgatattgtcaactttatcaatgatgagataattagaagcacgtggctttatttctggtttctctaagctgtctatgtgtctgtttttatagcagtaccatgctgttttggagactgtagccttgtagtatagtttgaacttgggtaatgtgatacttttagtttaattctctttgcttaggattgctttgggtgttcaggctgttttgaggaaccctaaaattcaggttccatatgaattttagatgtgattttctaattctttgaaaaatgacattgataatttgataggaatggtgctgaatctgtaaattgctntgggctgtgtgaccatttttttaacaatattagttcttcctaagcatgagcatgggatgtttttccatcttgctgtatcatcttgatttctttcagcagtgttttgtaattcttattccagagatcttccaaatccttggttaggtgtattcctatgtattttcttctttttgtggctattgcatatggtattgtgttcttgacttggctctaagctcagatattactggtatttagaaatgctactaatttgtgcacatcaattttatattctgacattttattgaagttgtttatcaggtctaggagcctttggaaagagaccaaggg

SEQ ID NO: 4161 - DNA, 661 bp, Homo sapiens
  misc_feature [331]..[331]: Chromosome 11, SNP identification no. = rs12418471
  misc_feature [331]..[331]: allele = c, in linkage disequilibrium with rs4922675, respectively
  misc_feature [331]..[331]: n is a, t, c or g
tgaatcttctttattagcctgaatagcagtctatatatctcatttcttatttcaaaacttgaacttagagtttcagtgatcttttctatggattttcttgtctctatttcactcatttcagctctaattttggttacttcttttgttctgttagttttggggttgatttactcttggttttctagtttgtctaggtataatgttgggttgttaatttgcaacatttctaacttcttgatataggaatttagcattataaacttcctcttaacactgcgttacccatgtcctagagtttctagtatgctgtatcttcattttcattttcttnaaaatatttttgacttcttcagtttcattctttgcccaaaagtgattcaggggcaggttgtttaattttcatgtaattgtatgtttttgagagatcttcttggtatcgatttctatttttactgtgctgtgttctgggactatggttgatatgattgcaatttgtttgaatttgtgaaaattgctttatgactgcatatgtggtcaatcttagggtatatgccatgtgcagatgagaagaatgttgttgtgtggcattgatatggtttgaatctgtgttcccatctaagtctcatatcaaattgtaatccccagttgggaggtgggaccc

SEQ ID NO: 4162 - DNA, 661 bp, Homo sapiens
  misc_feature [331]..[331]: Chromosome 11, SNP identification no. = rs12418503
  misc_feature [331]..[331]: allele = g, in linkage disequilibrium with rs4922675, respectively
  misc_feature [331]..[331]: n is a, t, c or g
gttttggggttgatttactcttggttttctagtttgtctaggtataatgttgggttgttaatttgcaacatttctaacttcttgatataggaatttagcattataaacttcctcttaacactgcgttacccatgtcctagagtttctagtatgctgtatcttcattttcattttcttcaaaatatttttgacttcttcagtttcattctttgcccaaaagtgattcaggggcaggttgtttaattttcatgtaattgtatgtttttgagagatcttcttggtatcgatttctatttttactgtgctgtgttctgggactatggttgatatnattgcaatttgtttgaatttgtgaaaattgctttatgactgcatatgtggtcaatcttagggtatatgccatgtgcagatgagaagaatgttgttgtgtggcattgatatggtttgaatctgtgttcccatctaagtctcatatcaaattgtaatccccagttgggaggtgggaccctgtgggtggtgaatggatcatgggggtggtttctcataaatgggttggcaccatcccccttgttgctgttctcatgatagtgagtaagtgagtgagttatcatgatatttggttgtttgaaagtttgtagcacctctctctctctctctctct

SEQ ID NO: 4163 - DNA, 661 bp, Homo sapiens
  misc_feature [331]..[331]: Chromosome 11, SNP identification no. = rs12418800
  misc_feature [331]..[331]: allele = g, in linkage disequilibrium with rs4922675, respectively
  misc_feature [331]..[331]: n is a, t, c or g
ttgcaacatttctaacttcttgatataggaatttagcattataaacttcctcttaacactgcgttacccatgtcctagagtttctagtatgctgtatcttcattttcattttcttcaaaatatttttgacttcttcagtttcattctttgcccaaaagtgattcaggggcaggttgtttaattttcatgtaattgtatgtttttgagagatcttcttggtatcgatttctatttttactgtgctgtgttctgggactatggttgatatgattgcaatttgtttgaatttgtgaaaattgctttatgactgcatatgtggtcaatcttaggntatatgccatgtgcagatgagaagaatgttgttgtgtggcattgatatggtttgaatctgtgttcccatctaagtctcatatcaaattgtaatccccagttgggaggtgggaccctgtgggtggtgaatggatcatgggggtggtttctcataaatgggttggcaccatcccccttgttgctgttctcatgatagtgagtaagtgagtgagttatcatgatatttggttgtttgaaagtttgtagcacctctctctctctctctctctctctctcggtcctactcctgccatgtaagatgcctgctcctgctttgccttccaccatgagt

SEQ ID NO: 4164 - DNA, 661 bp, Homo sapiens
  misc_feature [331]..[331]: Chromosome 11, SNP identification no. = rs12418826
  misc_feature [331]..[331]: allele = g, in linkage disequilibrium with rs4922675, respectively
  misc_feature [331]..[331]: n is a, t, c or g
ttactgtgctgtgttctgggactatggttgatatgattgcaatttgtttgaatttgtgaaaattgctttatgactgcatatgtggtcaatcttagggtatatgccatgtgcagatgagaagaatgttgttgtgtggcattgatatggtttgaatctgtgttcccatctaagtctcatatcaaattgtaatccccagttgggaggtgggaccctgtgggtggtgaatggatcatgggggtggtttctcataaatgggttggcaccatcccccttgttgctgttctcatgatagtgagtaagtgagtgagttatcatgatatttggttgtttnaaagtttgtagcacctctctctctctctctctctctctctcggtcctactcctgccatgtaagatgcctgctcctgctttgccttccaccatgagtaaaagctccctgaagcctccccagaagcagatactgccatgcttcctgtacagcctgcagaactatgaggcaattaaacctcttttctttacaaatgacccagtctcagattatttctttatagggctgtgagaatggactaatacaggcttgtttagcagatgtctgttaggtccatttgataaagtgtcaagtttaggtgtcaaatgtctttgttagtgttctgtcttaatg

SEQ ID NO: 4165 - DNA, 661 bp, Homo sapiens
  misc_feature [331]..[331]: Chromosome 11, SNP identification no. = rs12418831
  misc_feature [331]..[331]: allele = c, in linkage disequilibrium with rs4922675, respectively
  misc_feature [331]..[331]: n is a, t, c or g
gttgggaggtgggaccctgtgggtggtgaatggatcatgggggtggtttctcataaatgggttggcaccatcccccttgttgctgttctcatgatagtgagtaagtgagtgagttatcatgatatttggttgtttgaaagtttgtagcacctctctctctctctctctctctctctcggtcctactcctgccatgtaagatgcctgctcctgctttgccttccaccatgagtaaaagctccctgaagcctccccagaagcagatactgccatgcttcctgtacagcctgcagaactatgaggcaattaaacctcttttctttacaaatganccagtctcagattatttctttatagggctgtgagaatggactaatacaggcttgtttagcagatgtctgttaggtccatttgataaagtgtcaagtttaggtgtcaaatgtctttgttagtgttctgtcttaatgatgtatctaatactattggtgtggttttaaagattcccactatacttgtgtgattatataagtctttttcgtatgtttctaagcatttgttttatgaatctgggttttccagtgttggatgcatatatacctaagatagttaagtcttgttgaagttaatcctttatcattatgtaatacccttgtcttttttta

SEQ ID NO: 4166 - DNA, 661 bp, Homo sapiens
  misc_feature [331]..[331]: Chromosome 11, SNP identification no. = rs2957771
  misc_feature [331]..[331]: allele = c, in linkage disequilibrium with rs4922675, respectively
  misc_feature [331]..[331]: n is a, t, c or g
tttttgtctgaaataaaaatagcaacctctgctcttttacattttccatttgcttgatagatctatctccatccctttacttttagcctacgtgtgtcaatgcatgtgaaatgggtgtttggagacaatataaaattgggtcttgctgctttattcaacttgccactctgcgccttttaagtggggaatttagcccggttcattcaaagttaatattgatatgggatgatttgatactgttgtcatgttgttagctgattgttatgtaagcataattgtatatttgctttatagtgtcagagggctacgtacttaagtgtgtttttgtggnggcaggtcttttattatgaccacacacaggtgtggtggtaataaattaccttaacttttacttttctgaaaaggattgtattctccttcactaatgaagcttagtttggctggttatgaaattctgggttggaatttctttccttatttttatttatttatttatttatttatttatttatttatttttgagacggagtctcgctctgtcacccaggctggagtgcagtggtgcgatctcggctcactgcaagctctgcctcctgggttcacaccattctcttgcctcagtctcccaagtagctgggactacaggtgcccaccaccacac

SEQ ID NO: 4167 - DNA, 661 bp, Homo sapiens
  misc_feature [331]..[331]: Chromosome 11, SNP identification no. = rs12419276
  misc_feature [331]..[331]: allele = c, in linkage disequilibrium with rs4922675, respectively
  misc_feature [331]..[331]: n is a, t, c or g
tatttatttatttatttatttatttatttatttttgagacggagtctcgctctgtcacccaggctggagtgcagtggtgcgatctcggctcactgcaagctctgcctcctgggttcacaccattctcttgcctcagtctcccaagtagctgggactacaggtgcccaccaccacacctggctaattttttgtatttttttgtagagacggggtttcaccatattagccaggatggtctcaatctcctgaccttgtgtactgggattacaggcatgagccaccacgcccagcctggaatttcttttcttaaacaatggtgaatatgggcccncaaactcttctggcttgtaaggtttttttctgaaaggctggctattagcttgaaggagttccctttataagtaagcttccatttctgtctagctgccattaatattttttgtgtgtgtggaccttggagaatatgatgacgatgtgtcatggggatgatcattttgtacagtatcttgcaagagttctctgaattttctgaatttgcatgttgatctctctggtgaggttgaggaaatttttgtggataaattttcaaatatgttttccaagttacttgctctctttctctctctttctggggtgcagtgagttgtaggtttggtctctt

SEQ ID NO: 4168 - DNA, 661 bp, Homo sapiens
  misc_feature [331]..[331]: Chromosome 11, SNP identification no. = rs12420740
  misc_feature [331]..[331]: allele = t, in linkage disequilibrium with rs4922675, respectively
  misc_feature [331]..[331]: n is a, t, c or g
ctcccaagtagctgggactacaggtgcccaccaccacacctggctaattttttgtatttttttgtagagacggggtttcaccatattagccaggatggtctcaatctcctgaccttgtgtactgggattacaggcatgagccaccacgcccagcctggaatttcttttcttaaacaatggtgaatatgggcccccaaactcttctggcttgtaaggtttttttctgaaaggctggctattagcttgaaggagttccctttataagtaagcttccatttctgtctagctgccattaatattttttgtgtgtgtggaccttggagaatatgangacgatgtgtcatggggatgatcattttgtacagtatcttgcaagagttctctgaattttctgaatttgcatgttgatctctctggtgaggttgaggaaatttttgtggataaattttcaaatatgttttccaagttacttgctctctttctctctctttctggggtgcagtgagttgtaggtttggtctctttacaaaatcagatatttcaaggaggtgttgttcactttttagatgctttttacaaatttttgtctgaataagttgttttgaagaaccaatctttgagctttgacgttctttttctgcttggtctattctcctgttaa

SEQ ID NO: 4169 - DNA, 661 bp, Homo sapiens
  misc_feature [331]..[331]: Chromosome 11, SNP identification no. = rs2947750
  misc_feature [331]..[331]: allele = t, in linkage disequilibrium with rs4922675, respectively
  misc_feature [331]..[331]: n is a, t, c or g
ctggtggtgcacacatgcagagggacccatgccattctgccagtgctgcgctaaggcacttttgctaacagcctcccatcatagtgttgttgtcagtggtctgggaacacctcagcccctccagcacagcacgagtttaaccttgaggggccaggaaaagagctgcaggcctggtcacatcctcttaggggtagatcaggaagctaaggaatgctgagctgagctttggtccctgaaatcactcagaaacaaagccagttgaaaacccaacttttaccatagtcaaactctcaagagtatcaaagaatataaaagtgaaaaggtcccttcntaggacagcaacttcaaaccttaaaggaacatcagcccacacacatgagaaaggatcagaactctggcaactcaggcaagaactctggcaactcaaaatagctagagtgtcttcttacctacaaatgaccacactagctcctcagaaatggttcttaacccaactgaaatggttgaaataacagacataaaattcagaatctggatgtccatgaatatcattgagatacaggagaaagctaaaacccaatctaaggagtataagcgatccaataaaattatataagagcagaaaactgaaatagccactttaagaaagaaccaaactgat

SEQ ID NO: 4170 - DNA, 661 bp, Homo sapiens
  misc_feature [331]..[331]: Chromosome 11, SNP identification no. = rs2947749
  misc_feature [331]..[331]: allele = t, in linkage disequilibrium with rs4922675, respectively
  misc_feature [331]..[331]: n is a, t, c or g
cttttgcccgcagactctgcttaacagtctgagagcttttgcaggtgggtctctgctagtgggcacttgccctcagctggtccctgctgctttgctggtgcatgcacacactaaacccattgctgtcctaccactgaagtgcaagcacacctgggatgaaccatcaccccactggtggtgcacacatgcagagggacccatgccattctgccagtgctgcgctaaggcacttttgctaacagcctcccatcatagtgttgttgtcagtggtctgggaacacctcagcccctccagcacagcacgagtttaaccttgaggggccaggaaaanagctgcaggcctggtcacatcctcttaggggtagatcaggaagctaaggaatgctgagctgagctttggtccctgaaatcactcagaaacaaagccagttgaaaacccaacttttaccatagtcaaactctcaagagtatcaaagaatataaaagtgaaaaggtcccttcgtaggacagcaacttcaaaccttaaaggaacatcagcccacacacatgagaaaggatcagaactctggcaactcaggcaagaactctggcaactcaaaatagctagagtgtcttcttacctacaaatgaccacactagctcctcagaaatggttcttaac

SEQ ID NO: 4171 - DNA, 661 bp, Homo sapiens
  misc_feature [331]..[331]: Chromosome 11, SNP identification no. = rs2947745
  misc_feature [331]..[331]: allele = t, in linkage disequilibrium with rs4922675, respectively
  misc_feature [331]..[331]: n is a, t, c or g
aaagaggacgcagaccctgggctgaaagagaaggaagctgcaaaccctgcacaggattgccaactagcaggaacagttgctgttgatcaggccatgggcgcccatcccctaaggcttgccatactcctctaggaaactttagggtttgttgattgccagacctggacagagtagggctatctaacctgttagatggggcaagtctgatctgagcaatcactgcctgctgttctatctctgggtccctgcctggccatatttactcgcagtgaaacctcagctgtctcggagaggagtttgctggtagtcaccctcatacctcttttgcccncagactctgcttaacagtctgagagcttttgcaggtgggtctctgctagtgggcacttgccctcagctggtccctgctgctttgctggtgcatgcacacactaaacccattgctgtcctaccactgaagtgcaagcacacctgggatgaaccatcaccccactggtggtgcacacatgcagagggacccatgccattctgccagtgctgcgctaaggcacttttgctaacagcctcccatcatagtgttgttgtcagtggtctgggaacacctcagcccctccagcacagcacgagtttaaccttgaggggccaggaaaagagctgcagg

SEQ ID NO: 4172 - DNA, 661 bp, Homo sapiens
  misc_feature [331]..[331]: Chromosome 11, SNP identification no. = rs6484016
  misc_feature [331]..[331]: allele = g, in linkage disequilibrium with rs4922675, respectively
  misc_feature [331]..[331]: n is a, t, c or g
ggtgaagctcttcctggctgtgttaaattggccatcttggctccttccctccatttaatcttaatttactgctaaaagtcctgtctccaaatagtcacattgggggttagggtttcaacattgtagggacaaaaataccatctacagtatcatttaaatgaacagaagcatttattctatttttatttactataattacaaaaatgttcaattaaaatatgttattaacacttttgttttcttcaaagattcttatagtgttagctcttacatttaggttttaattcattttgaggtaactttttgatatattgtgagctacgcattttangtatggctatagtagccatttactgaagtgaggtcaaagtgaaaatcattgaagttgagagcaaacacatgtaaaactaaacaatggaatgagtcattatattaaaattaatcaaggtaatagtaggaggtggaagggagaggaatatctaactgggattcacagtctcattttctgcaaggagtaaattcatttgcttttttagttaataatgaagtcaatatctcaatccctttatgattttcttctggttgtcatatttatcatgcagttctgattactgtgtatgttaattatcatacactgcctctttaaaattctactaaaatt

SEQ ID NO: 4173 - DNA, 661 bp, Homo sapiens
  misc_feature [331]..[331]: Chromosome 11, SNP identification no. = rs2957776
  misc_feature [331]..[331]: allele = c, in linkage disequilibrium with rs4922675, respectively
  misc_feature [331]..[331]: n is a, t, c or g
aaggagccaatataccttttttcttctaagcaatgtccccagaatgactttatttaaaaaaaaagtttcattgaaatgcatctttatttatatctggaaagaaataaaacagctaatctagcactatagatgccacgatcatattcattttgcattaagtaatcaagatatcataagtagtgggtcaatcatgagaaagccaggattcaaactaggtgagcttatttgagaaaacatattattaataattaaactatccgctttttcactacattctttgggatgagtccatggtgtgtgcagcctgagaagcttcctaggtaactctganattcattcctgattgaaaattgctgctctaagcacaaaactctgtgcatgataactgcttgaacagccttgtgcttaaagtgtcagcttttttctacttgataagaaaaagggatatagaattgaataaaaagccccattctgttagaaatgtgaagttaagctaggtgccataatacttcctgcagagtgcaataaaacaattcttgtgaaaatgtggtttagtaacttacttttaatcctgctcactattatgtagattcttcaataaatgtggaactgtcgcttcatatatcttagtgtgctataacacttccaaggaccccataag

SEQ ID NO: 4174 - DNA, 661 bp, Homo sapiens
  misc_feature [331]..[331]: Chromosome 11, SNP identification no. = rs2947760
  misc_feature [331]..[331]: allele = g, in linkage disequilibrium with rs4922675, respectively
  misc_feature [331]..[331]: n is a, t, c or g
cgatcatattcattttgcattaagtaatcaagatatcataagtagtgggtcaatcatgagaaagccaggattcaaactaggtgagcttatttgagaaaacatattattaataattaaactatccgctttttcactacattctttgggatgagtccatggtgtgtgcagcctgagaagcttcctaggtaactctgatattcattcctgattgaaaattgctgctctaagcacaaaactctgtgcatgataactgcttgaacagccttgtgcttaaagtgtcagcttttttctacttgataagaaaaagggatatagaattgaataaaaagcnccattctgttagaaatgtgaagttaagctaggtgccataatacttcctgcagagtgcaataaaacaattcttgtgaaaatgtggtttagtaacttacttttaatcctgctcactattatgtagattcttcaataaatgtggaactgtcgcttcatatatcttagtgtgctataacacttccaaggaccccataaggacactacatatttggaggcacctgtaaaatacagtttgaagtgccctttcatattattcttatcacattatttaattgtcaataaggtctttaaggtaaggaattgtgttcttgttttctctatttagccccaa

SEQ ID NO: 4175 - DNA, 661 bp, Homo sapiens
  misc_feature [331]..[331]: Chromosome 11, SNP identification no. = rs12418372
  misc_feature [331]..[331]: allele = a, in linkage disequilibrium with rs4922675, respectively
  misc_feature [331]..[331]: n is a, t, c or g
catggtgtgtgcagcctgagaagcttcctaggtaactctgatattcattcctgattgaaaattgctgctctaagcacaaaactctgtgcatgataactgcttgaacagccttgtgcttaaagtgtcagcttttttctacttgataagaaaaagggatatagaattgaataaaaagccccattctgttagaaatgtgaagttaagctaggtgccataatacttcctgcagagtgcaataaaacaattcttgtgaaaatgtggtttagtaacttacttttaatcctgctcactattatgtagattcttcaataaatgtggaactgtcgcttcntatatcttagtgtgctataacacttccaaggaccccataaggacactacatatttggaggcacctgtaaaatacagtttgaagtgccctttcatattattcttatcacattatttaattgtcaataaggtctttaaggtaaggaattgtgttcttgttttctctatttagccccaaaaacttgagtatcagagtgatgtgtattactggttcaaaaaatgcctcctgaattcttattttgtgacctccctttgtttaaaaatgacttttctcagacttatgaaatgcagggtctcaatattattcaggacaacaaactatttgtcttgca

SEQ ID NO: 4176 - DNA, 661 bp, Homo sapiens
  misc_feature [331]..[331]: Chromosome 11, SNP identification no. = rs12421188
  misc_feature [331]..[331]: allele = c, in linkage disequilibrium with rs4922675, respectively
  misc_feature [331]..[331]: n is a, t, c or g
catgataactgcttgaacagccttgtgcttaaagtgtcagcttttttctacttgataagaaaaagggatatagaattgaataaaaagccccattctgttagaaatgtgaagttaagctaggtgccataatacttcctgcagagtgcaataaaacaattcttgtgaaaatgtggtttagtaacttacttttaatcctgctcactattatgtagattcttcaataaatgtggaactgtcgcttcatatatcttagtgtgctataacacttccaaggaccccataaggacactacatatttggaggcacctgtaaaatacagtttgaagtgccntttcatattattcttatcacattatttaattgtcaataaggtctttaaggtaaggaattgtgttcttgttttctctatttagccccaaaaacttgagtatcagagtgatgtgtattactggttcaaaaaatgcctcctgaattcttattttgtgacctccctttgtttaaaaatgacttttctcagacttatgaaatgcagggtctcaatattattcaggacaacaaactatttgtcttgcatgtgcatttttaataaaaatcatttcacaaataagaaagccatataaaaaaggaagatactatataatcaagaacctggtaggaaata

SEQ ID NO: 4177 - DNA, 661 bp, Homo sapiens
  misc_feature [331]..[331]: Chromosome 11, SNP identification no. = rs7924473
  misc_feature [331]..[331]: allele = t, in linkage disequilibrium with rs4922675, respectively
  misc_feature [331]..[331]: n is a, t, c or g
ggagtatggacagagccactgctcaagcctccacagagacccacaggctttggatctctaagtatcctgttgccaacagcaatagacctgccaacaagggcccccaggctcttgtgtgtacctctggataggggctatatctatggtgctgagaagcagatggacaacagtttgctcctcctctatatctctccaggcagggcctcctcgcctgggcccccattacagctgccccatcacacttgattacttaaatcagtagcagcctgcatttctctgggatggagctcccaaagacaactgaaaggtcttctgtcattgctgccacggnggtaatcatcgttgcttcccccagctagagaggaaacaaacattctgattgtttttgtgctcctatagtgtgctttaactgtcctaaggagagaaggacagactgttctctccatgagttcccagaccccctgttcttcaccaggcagggccccatggcttaggccggcagcataattgttgtatcccagctgatcactttgatcagccatgagtctgtttctgtggagcagagctcccagagaaaactcacaggcccactgccattgccactgctgaggtcactgccctgttgcctcaaactttggggtgaggggagaacaaaaagcct

SEQ ID NO: 4178 - DNA, 661 bp, Homo sapiens
  misc_feature [331]..[331]: Chromosome 11, SNP identification no. = rs1320356
  misc_feature [331]..[331]: allele = g, in linkage disequilibrium with rs4922675, respectively
  misc_feature [331]..[331]: n is a, t, c or g
ttgctgccacggtggtaatcatcgttgcttcccccagctagagaggaaacaaacattctgattgtttttgtgctcctatagtgtgctttaactgtcctaaggagagaaggacagactgttctctccatgagttcccagaccccctgttcttcaccaggcagggccccatggcttaggccggcagcataattgttgtatcccagctgatcactttgatcagccatgagtctgtttctgtggagcagagctcccagagaaaactcacaggcccactgccattgccactgctgaggtcactgccctgttgcctcaaactttggggtgagggganaacaaaaagcctcaactcgtcccagggctgcagcgctgacatctgtggccagcactcaaatattcaaacgggggaggagcccacacactcagtgcactgacatggatgaggctcatgggtccacaggctgctccaggagcccggaatgcctccctctacaggactggcccagaaaaggcatggcttatctccctgcggtggcttctgttgagggagctccatagcctggaacacctaacaaaggacacacaagtgcagtgccagtgattggagggggctcctttaaggcccaaaagggaacatggtgaggcgcgtcaccactctccctgc

SEQ ID NO: 4179 - DNA, 661 bp, Homo sapiens
  misc_feature [331]..[331]: Chromosome 11, SNP identification no. = rs1320358
  misc_feature [331]..[331]: allele = a, in linkage disequilibrium with rs4922675, respectively
  misc_feature [331]..[331]: n is a, t, c or g
ttaactgtcctaaggagagaaggacagactgttctctccatgagttcccagaccccctgttcttcaccaggcagggccccatggcttaggccggcagcataattgttgtatcccagctgatcactttgatcagccatgagtctgtttctgtggagcagagctcccagagaaaactcacaggcccactgccattgccactgctgaggtcactgccctgttgcctcaaactttggggtgaggggagaacaaaaagcctcaactcgtcccagggctgcagcgctgacatctgtggccagcactcaaatattcaaacgggggaggagcccacacnctcagtgcactgacatggatgaggctcatgggtccacaggctgctccaggagcccggaatgcctccctctacaggactggcccagaaaaggcatggcttatctccctgcggtggcttctgttgagggagctccatagcctggaacacctaacaaaggacacacaagtgcagtgccagtgattggagggggctcctttaaggcccaaaagggaacatggtgaggcgcgtcaccactctccctgctgcactccagagcacacctgcaaacaccagaaatacaaaggagctatgtggctaagaacctatctactgcccattattcttaagtgt

SEQ ID NO: 4180 - DNA, 661 bp, Homo sapiens
  misc_feature [331]..[331]: Chromosome 11, SNP identification no. = rs2403903
  misc_feature [331]..[331]: allele = g, in linkage disequilibrium with rs4922675, respectively
  misc_feature [331]..[331]: n is a, t, c or g
ttattcttaagtgtcatctaacagataaaagcccaaactacaaccccaaagccactttgctaatattctcccttgtgcaaccaatggcaaggattcagacccaaataaagaccctgcacaaagccttggctctctgaaaaatccagaaacaaagccaagtgactatactcaagttacgccatagttaaaaaagcaccagttctctcagatgagaaagaatcagcacaagaactctggcaataaaacaaagaaaaaaatgttcttttatctccaaatgagttaactagctctctagcaatgattcttaatcaggcagaagtgactgaagtgncagacattaaattcagaatctggatgttaaggaagttcattgagattcaataaaaagttgaaacccagttcaagatatccagtaaaatgccaagagctaaaagaaaaaaatagccactttaaaaagagccaaactgatcttctagagttaaaaaatatactaaaataatttcatgatacaattagaactactaacagcagaatatgccaaaacaaagaaagaaactatgagcttgaagacaagtgctttaaattacctcaatcaggcaaaaatcaagaataaagaattaagaaatgtgaataaaacctccaagaaatatgggactatgta

SEQ ID NO: 4181 - DNA, 661 bp, Homo sapiens
  misc_feature [331]..[331]: Chromosome 11, SNP identification no. = rs10767169
  misc_feature [331]..[331]: allele = t, in linkage disequilibrium with rs4922675, respectively
  misc_feature [331]..[331]: n is a, t, c or g
tacaatctttctcagacaagaaaatacagaggaaattcatttcaattagaccagtcttacgagaggtacttaagggagtgctaaacatggcactgaaagaacaccaactgctaacacataagcacacttaagcacatttcccaaaggaaatagaaagccactatacagccaattttacataacaaccagctaacaatatgaagacaaaatctcacatagcaattctaaccctgaatgtaaatggactaaacagcccacttaaaaggcttagagtggtcagcaggataaaaagacaaggctcaaccatgtgttactttaagacccatctcangtggaatgatacagataagctcaaagtacagggatagaggaaaatctaccatgcaaataaaaaacaacaaagagcaggagttgctattcttatatcagataaaacacactttaaaccaataaatatgaagaaggacattacttaataatagagttcaactcaacaaggagacttaactattctcaatatatacacacccaacatttgagtttccagattcataaaacaagttcttctggaactacaaaaagacatacagaaccacacaataacagtgggagacttcatcatctcattgatagcattagacagatcatcaaggtagagaac

SEQ ID NO: 4182 - DNA, 661 bp, Homo sapiens
  misc_feature [331]..[331]: Chromosome 11, SNP identification no. = rs7940481
  misc_feature [331]..[331]: allele = t, in linkage disequilibrium with rs4922675, respectively
  misc_feature [331]..[331]: n is a, t, c or g
ctattctcaatatatacacacccaacatttgagtttccagattcataaaacaagttcttctggaactacaaaaagacatacagaaccacacaataacagtgggagacttcatcatctcattgatagcattagacagatcatcaaggtagagaactaacaaaataattgtggacgtaaactaggcacttggccaattggacctaatagacatctacagaaagctccacccaacaaacacagaatatatattcttctcacctgcacacacaacatattctaaaatcaaccacatgctcggtcataaaacaagtctgaataaattaaaaaaaantacaatcattcaagcacactcttagagtattctgaaataaaaacagaaatctatatgaagaacctctctcagtactacccaaattcatggaaatcaaacaacttattcctgaatgactccctggtaaacataaaaattaagatagaaataaaaaatttctttgaaattgatgaaaataagaactcaacttaccaaaatctctgagatgcaggtaaagccagtgttaaggggaaagttgataccactaaatgccgtcatcaagaagttagaaaatctcaattaacaatctcaatttggacctaaaagaactaagggggaaagaaaaaacca

SEQ ID NO: 4183 - DNA, 661 bp, Homo sapiens
  misc_feature [331]..[331]: Chromosome 11, SNP identification no. = rs7114820
  misc_feature [331]..[331]: allele = a, in linkage disequilibrium with rs4922675, respectively
  misc_feature [331]..[331]: n is a, t, c or g
ggagaggaagatccaccctcaatgtgggtgggcaccattctggctggaagtgtggctagaacaaagcatgtggaagaaggtgggatgagctggcttgctcagtcttctgggttcatctttcttccttactggatgcttcagtccattcctaccacccttggacatcagaccccagggtttttggcctttggaatcttggactttcaccagtggtttgccggggactctcaggccttcagccatagactgaaacctacaccgtcaactttcctgcttttgaggcttttgaactcggactaagccactactgccttctttcttcctcagcttncagacagcctattgtgggacttcgccccatgactgtgtgagccaattatccttaataaactccctttcatataaacatatatcctgttagttctgttccgctggataaccctgactaatacaatatagaaaacaaaaaagagcctgaatagccaaagcaattctaagaaaaagaacaaagtcagaggcatcacactagccaacttcaagctactataaagctatagtaaccaaaacaacatggtactggcacaaaaacagactcatggaccaatggaacaggttacaaaactcagaaataaagccacacacttacaaccatctgatcttc

SEQ ID NO: 4184 - DNA, 661 bp, Homo sapiens
  misc_feature [331]..[331]: Chromosome 11, SNP identification no. = rs333789
  misc_feature [331]..[331]: allele = g, in linkage disequilibrium with rs1512369, respectively
  misc_feature [331]..[331]: n is a, t, c or g
gctgtggtggtggaaatatttttttttctttcagtcaaataggaaggaagataataagatcgtcagctgagaatgaacttggaagaggatgtgttgagggtttgaatagagaggtgatatggtttggttatttgtcccctctaaatctcatgctaaaatgtgacctccaatcttgggagtgaggctgagtaggaggtgtttggtcatggggacagatccctcatgaatggctttgtgccttccctgtgacaatgagtgagttttatttctattagttcatgagagaattggttgttaaaaagaacctgaaacctcttcctctttttcttcnctccttcaccatctgacacaccagctatccttgcattctaccatgagtaaaagttgcctgaggcctcactgaaaactgagcaggtgtcagcctcatgctgctggtacagcctgcagacccattagccaaataaatctctcttaaaaaataaattatccagcctcaagtatttctttatagtaatgcaaagcagactagtataataggcaaatgcattaaactggagattgagaaaatgcatgaactagtgaaaaatggtttaattacctggcagcatcaaggacccctaagcttcattgtcattaagttaaagtgaaaccgatctggtgg

SEQ ID NO: 4185 - DNA, 661 bp, Homo sapiens
  misc_feature [331]..[331]: Chromosome 11, SNP identification no. = rs932048
  misc_feature [331]..[331]: allele = g, in linkage disequilibrium with rs1512369, respectively
  misc_feature [331]..[331]: n is a, t, c or g
tcagggacttggaaggaatatggttagagaattagtgacatagagatctgaggaagaggtatatggatagatctctcatattgggcaaataacatatttaaatgttttcaaatatttgtgtgccatgtgaatattcaccagtaggtgacttagtagagaataatgttataaatggaatggttagaatgaccttttctgtggatactagccaggctcttttcccagccacctttgtcattacccagtgggctcatgacaaagcccattgggtaatgacaagggtggctggggaaagaggttcgcagtcacagtggcagggataagagtcatnaactctgcagtgtatgagctctggggacaagggtggctggggaaagaggctcacagccacagtggcagggataggagtcatgagctctgcagtgtgtgagctctggggacaagggtggctggggaaaagaggctcatggccacagtggcagggatagcagtcatgagctctacagtgcatgaactctgcagcaaagacttcgctcaccatgtaagcggcaacagccatggttgaatccccagtttttcagcagcagataccaatcctgagtccccactatggcataattctccaggtagatccaacagcaaactagttgattacagtgaa

SEQ ID NO: 4186 - DNA, 661 bp, Homo sapiens
  misc_feature [331]..[331]: Chromosome 11, SNP identification no. = rs10768243
  misc_feature [331]..[331]: allele = c, in linkage disequilibrium with rs1512369, respectively
  misc_feature [331]..[331]: n is a, t, c or g
gccaattctatacagcctaatatataatataataatgatataatataattctccattacattagtccaattgtaaagaaacaagccttgatatagtagtgaggatacaaaatggaattaaaaggatagatttaacagtgattacaaaggaggaactcaaaggactttgaaatagatcacatagtatgcatctttcatgatgtgtgtctgtgtgtgtgtaggttagagaagagaaaaagataaacccaacgtgactacaattttcaagttgcataactgagaggaagcaatgctgcccataaaagaacgaagggaaagaaataattatgtcncatatcagattcatacctaacactcactgagaacatagtatatgtcaggcactgttctaaacatacttcatgtagtctcttattcaatttgtacataaatatgatggtaggtgtcattgttttgcttattttatagctgaaaaatgaaaaaaagagagacaaagaggctaaaaaatgtgtgccgttgaggtaaatggaaagattcgagaggggctagtttaaatgcagggcgagtgtttagaaggaagagagatggagaggatatgcacattcaagttacatttcaagttatttgtatggattgttaaattcagtatgctgatttgatgt

SEQ ID NO: 4187 - DNA, 661 bp, Homo sapiens
  misc_feature [331]..[331]: Chromosome 11, SNP identification no. = rs974284
  misc_feature [331]..[331]: allele = t, in linkage disequilibrium with rs1512369, respectively
  misc_feature [331]..[331]: n is a, t, c or g
aactaatcttattttaagcagtagagcccagaccaaaagaaagtgacatggctctagtattacttcaattgatattcttaattataatattattgatgttctgtaagaaagcctagaggcaaaagcaaaattaaaattaatcatattcaacattaaaatcaataggcaaaaccatgtgaagacttgcagtaataattcatagaaatcaccttctcattacccatttcactacatacttacaggacttaaaaaatgtgccttttagatataggcccaattatttacacatttcaaacacacggttcattttaccagtgtaccataaaaatanttgtaagaaatgctcagttaagagccttaaattattgaccttcttttgagtgggtgagctggaattttaaagagatttgaggtttccccagatgtgttctatgaaaccttatttagtaagtctacaaagaatattgtggtcaagtacgctgggaaagtgcaggcttatacaaacttgagtaattttctttactgcagtatgtttcaaaactattagtatgctaatataagttgtgaatcattaagttggagatagagtatgcattttccaaaatgaatttccctacatagttctctttttcagagtcatcctaacagacttgggttaaac

SEQ ID NO: 4188 - DNA, 661 bp, Homo sapiens
  misc_feature [331]..[331]: Chromosome 11, SNP identification no. = rs11033927
  misc_feature [331]..[331]: allele = g, in linkage disequilibrium with rs1512369, respectively
  misc_feature [331]..[331]: n is a, t, c or g
gccagctaaataaataaagatcaaaaagaaatgaatacataattattatggaaattttggaaaatttagaggcatagaaagatgaaaactctagtgccacctgccatccagaggtaactattattaatcttttaatataacactttgattgaacaagcgtttttctgtattccaagatgctccaaggagacaggtccctagcactgtcatgattctttcctaaataactagcacccaaggctgctcatgtgggagtcctacataaaagcaccagcagtaagagcaagatccctctctgaaccatgattcatgatgtgcccagctgtggccncccaagcacaagtctccatgtgatgctgagaagataggggaaccacttgactccagcagctgccaaatgtctgttagttctagtttgcagtaagtgatgttttcccaaaccatttgctgtacagtaacactcaacatggggctctgttcgcttgaggcttctcttccccaagggcaaagatatttgctctattagaaatatatccatgcagaatgtcttctgacatccccttcatctcatctggctgccctgcatattttgtcaaggcaggtcacaactaagtaaacagctgaacaatatttattaatttttctttctgctttgcccctt

SEQ ID NO: 4189 - DNA, 661 bp, Homo sapiens
  misc_feature [331]..[331]: Chromosome 11, SNP identification no. = rs964364
  misc_feature [331]..[331]: allele = a, in linkage disequilibrium with rs1512369, respectively
  misc_feature [331]..[331]: n is a, t, c or g
atcttcagtaaatattcattgtttttgttgctgaaggtggcattattattattcccaccattgctcaggtttccaccacccaaagagggctcagttcttggtgatgttcctattcgtagttttgacctttctgaaaggaatcattcacaccagctcccttaacctgatctgcccccatctcaaaagtcttcctgaaatctgggcttcagagcagcatccaaaaatatgtcctaccaggctcttgccaccatcaatagctagaaaaggaaggaattcagaaggagaaaaaagaatagctataacttgacgtttagatctaaacacaatacantcccagataagcaacctgcctgcattcagatttcttaattttcaatttctatttaccactgaaaccctggcacacagagatactctttcaggaatctctagaacttctatgaaactgattatcaactaacctaagtcagttcacatacatgagtgaatgaagctttatccaagatgaagggtcctgactgggtaaaaataatttctgaggaaatttctttatcccaaacagtagacgttcaaacgagcatgtggccataaacattattgaatgcaacttccacatggtacagagtaaaatgcagagtcttgtgaggtcagattgctatat

SEQ ID NO: 4190 - DNA, 661 bp, Homo sapiens
  misc_feature [331]..[331]: Chromosome 11, SNP identification no. = rs10768245
  misc_feature [331]..[331]: allele = t, in linkage disequilibrium with rs1512369, respectively
  misc_feature [331]..[331]: n is a, t, c or g
ctggctaatttttgtaattttagtagagatggggtttcaccatattgacgaggatggtctcaaatcctgacctcaagtgatctgcctgccttggcttcccaaagtgctgggattacaggtgtgagccactgtacccagctgaatgcttgcactttgatgagaatatccttgttaggcacacaaagcctaataattcaacctttattagtgtccagatactttccccttcccagaacaacagtcattttctgatttgcttgttttaattttatagccactccctgtttgtgtctccttcttacatctgctgtacttacatatttatatgaantgttgactacctttcattctttcctgagttataaggcctatttctatcagtttccttcttcttgcttgccattgatggattcattgttgatcttctattttctctcttctggctatttttgtagttttgtttaccactagtaatcaataaagactgcaataaatccatttttaaatgaaatggacaaaagagtgacaccctcaaaaaaacagtgatggtaaaatacatcaaatacggaaacaagtgctagacctggggtctaaaaaaggggtgtaaactctgccattttcttcctaatcacaagcaaaccccacggtacatttggacttt

SEQ ID NO: 4191 - DNA, 661 bp, Homo sapiens
  misc_feature [331]..[331]: Chromosome 11, SNP identification no. = rs2137344
  misc_feature [331]..[331]: allele = g, in linkage disequilibrium with rs1512369, respectively
  misc_feature [331]..[331]: n is a, t, c or g
accatcccaagccaccaccctattatgattattgtaccttatttggattatcagagtagcctctcaaatgctgttcagctcctcccctttcccacatcagtcagttctgaaaacagcaacccaagagatcttgttataatgtaaagcagaacctgcaacttcttttcctcaaaacccccaaggagtttagcatctcactcaaactaaaagccagcgtatgctaatcaagaacttcaggaccctacatgatgtgatccccttcccattgccattccttctctgcctccatggcattctggtcttccctctctcaagtacaatcccaacagcnccctttctgttgctggaacaccagacacaatcccaccttagagcttttgcccttgtggttctctaagaatgccctctaccaattatcagcatggttagcatcctccaggtctcaattctcaagtcaccatcacaaggaagccttccctggacaatgtatctaaaatttcaatgtccactaatgtatcacagcccattccacactctcatttattcttagcatgcttcattacctaatatattatagtattgtttaaatttatttggtttattatgtctctgccaggagaatgtaagctatgagagaagcaattttgtttttcactattgt

SEQ ID NO: 4192 - DNA, 661 bp, Homo sapiens
  misc_feature [331]..[331]: Chromosome 11, SNP identification no. = rs1996027
  misc_feature [331]..[331]: allele = a, in linkage disequilibrium with rs1512369, respectively
  misc_feature [331]..[331]: n is a, t, c or g
attgatctgagaggcatgtagaaaactaatattcatttcctcattttctttcccaattaagaaagagcaagtcagttcagatggcttgtctagggtcacagaacaagtcagtggtgagcccctgtgtccattaattccagtcagacagggtgcattgagcattgctaggaggctttgctcattcagtgatcactgaatggatggaagtcagatatttgctactgagatattttcagggtgaggcccactgacctgcagaggattgattgagtcttcgacattgctgtagcccaatgaggacagctcactagtaaattaaaccttgacttanggttttgccctcagttctaagcaacaccttgggatgaatcaggaatacatcacatttccaaatacagtaaaattaattattacacatattttatcagccacattttgctcgatttctgcaaccaagaaatggactgaaaattatggcattattcatttaattactcataagaatacctgtgacatacattcatataaccatgaagaccctgtatgaaattgattcacccaagaacatcagaagtgttcttttttccattgcaacataatgaataaaaacaaatgtattataagcaagtctgtcgatatggaaggaggcaaaataaaataa

SEQ ID NO: 4193 - DNA, 661 bp, Homo sapiens
  misc_feature [331]..[331]: Chromosome 11, SNP identification no. = rs1512370
  misc_feature [331]..[331]: allele = a, in linkage disequilibrium with rs1512369, respectively
  misc_feature [331]..[331]: n is a, t, c or g
ctctgaggaataaatgaaatcctggagataaagtgcacggtgtccacagcacacattgttggtagccttaatggcttccgcttcctggtcccattcctaatagggcctccgtggatttcctagccactctgttttgatagatttgacatcgatttccaggggcagaggttggccctagttagcgtaagcaatttagagtattctgttttcttggaatacagagattgatttaaagatggcacatggcacagttttagacagtgagactgaggggacattttctgtgggcttcaagaatgaagatttcttacttttttgcatgaactccccnaagagatacccctcatctctgctggatgtaaatgaggggtagctgttactggcagccatcatgaaaggaagcctgagaaacaaagggagagaaagaatagaattcagtctttggtgatgttatgagctgctggaccaaatctcttctgtgaatatgttagttaaatgaatcaatacattctctttattatttaggactattgatttcagctttttgttatatccaataaaaaaaatctgtgtacctcaatgtaaaataccttcactaaatgtaatctattttaagtcaaatggcaaaatgtttttaatttaattcagaaaattatttaaa

SEQ ID NO: 4194 - DNA, 661 bp, Homo sapiens
  misc_feature [331]..[331]: Chromosome 11, SNP identification no. = rs1512371
  misc_feature [331]..[331]: allele = a, in linkage disequilibrium with rs1512369, respectively
  misc_feature [331]..[331]: n is a, t, c or g
gaaaggaagcctgagaaacaaagggagagaaagaatagaattcagtctttggtgatgttatgagctgctggaccaaatctcttctgtgaatatgttagttaaatgaatcaatacattctctttattatttaggactattgatttcagctttttgttatatccaataaaaaaaatctgtgtacctcaatgtaaaataccttcactaaatgtaatctattttaagtcaaatggcaaaatgtttttaatttaattcagaaaattatttaaaatatcagtgactttttgaaataggatagacatcttagcacctggtattctagcatatggcctntaaaatctccctaagtgttttaatttctcttctggaatggaatatgaaaaaaataagacctagaaggaaatatgtgggtttatattctttaatttaccatacaaattaaaaatttacacgtctaagtttaatcctagtaatattcagctaccttgcctacatccctccttgctgcctttcatttcactatagcttgctctttcttgcccctggaaaatgcctctaaatccctgaacctgtcaattttcacaagcgtgtaattttactttagctaaattctaaacaccagcaagaggtgaatttgacaaaggaactgtgaaagagtcttat

SEQ ID NO: 4195 - DNA, 661 bp, Homo sapiens
  misc_feature [331]..[331]: Chromosome 11, SNP identification no. = rs179801
  misc_feature [331]..[331]: allele = c, in linkage disequilibrium with rs1512369, respectively
  misc_feature [331]..[331]: n is a, t, c or g
ggttgtcagagtgtttcatcaagtggaatgtgagaattctggacagtgtgaggttgatggaatctcaccttatttaagtttcatgtgtcaccctgtttccttgactatgaccacattgtaaacagtgaaagtgatgataactacttttgaaccccctaggaagaaagtaaaaggtattgcttttcatatacttattgagaaaacatacagcactaagcagactctattggttggatgcatattggatgtttatcctggaaccaattacttaaccaagtctgacagttgtggtcaagatactaaaagtgacacttgtaaagtgtcaatcagntggtggtttaggcaacaatagtctctgtctgtatcgtctccccttaaattttgtttgaaaatattttatttcataaccttttactttaaaatgtaaacaattgagagtttaattttgaagatgggggaacctaaaaaattgtaatacaatgataaaagctctacaaatctttatatcttcatcaaaaattgttgacattgaaattaaggttgaataagcaggatggaaaatagtttcatattttgttggaagaggtgatatatgaaaaagagtttaagacatatgaattttttttcagcattcctatttgtacagaagaaaaagattttt

SEQ ID NO: 4196 - DNA, 661 bp, Homo sapiens
  misc_feature [331]..[331]: Chromosome 11, SNP identification no. = rs334975
  misc_feature [331]..[331]: allele = g, in linkage disequilibrium with rs1512369, respectively
  misc_feature [331]..[331]: n is a, t, c or g
aaagtaaatttatccttatgatcacattttccatgatgttcttttaaactagagataataattaaaatatattttgtctttcacttttgttaaatctgagaaaactactgtttctgttctgattaccaaatcttctgtttattcatttcttttccagggagatgaaaaagacatggctttctaacaaggagaagactgagctccaaacaagtcataatcctagagacaggtacctgggcaaggtaacactattaataagagtttgttaaggaaaagtatggtggaagtgtaaacggttttgccagcctctaccttcagctctctattgcgnttaagtgagaatgaaagcaaacattttacatttcctgcccttaaacaaaggaaagctttatgtgtaaattttcatactctttttctttgtggtctgagattgggtaaagtcagggaaggaagacatatatgatagagcaatgtcaattacgaagaccttagtttccaggcagagcatttgagatttcagctacagacttccatttaatgctttaaaatgtaacaataagcctttggttggtcaatgttaagtggttggacttcatgtaatatgttttgccatctcagttcattccagtgtatcggtgttccagagccaggatgcagaaaa

SEQ ID NO: 4197 - DNA, 661 bp, Homo sapiens
  misc_feature [331]..[331]: Chromosome 11, SNP identification no. = rs1512369
  misc_feature [331]..[331]: allele = t, c
  misc_feature [331]..[331]: n is a, t, c or g
ctttttctctgattctttatgaaaagggaaatatcaattttgatctcacctgaaggaacaacattataattataccaaggagaaacatacaggcgaaaggaagcataaggaccataagaagaaattaaatcttttcaaagctaggggggaaaatggagtgtcagtgccaagaaggataacacctacatacgctcaggaacttcagtggtaaattcacgggtaatatatgactattccaacacagtcttcatttattatgtttgccttgtgggcaaagtagagaaataccttacctcatcaatatgaaactgctcaaaactcagaagctacngccaatagtaatatgtttatgaaatatatatatttttaaaccctcattgcttacagatcaaagctacaactgcacatagcatcaacaactgccaattcatatggaaatctactctctgatgttgcaaaagaagctctaactgttcattttgtatcagtatgtggctatctccctgcaattttccagtcaatcaaattaaaataaggatatcaaccacaatctaaagtagaacacacaacttttaaatgtgttttaatgatacagtaacatgcaatactctgtaaactattactaagagctttcccaaggaactttgtgagaagattcaga

SEQ ID NO: 4198 - DNA, 661 bp, Homo sapiens
  misc_feature [331]..[331]: Chromosome 11, SNP identification no. = rs1512368
  misc_feature [331]..[331]: allele = c, in linkage disequilibrium with rs1512369, respectively
  misc_feature [331]..[331]: n is a, t, c or g
gtacaggaggcccctctaaagactcatagaaggctctacattctcaacttatatatcgaagggaaaatggccagaaattggcttgggtaggggaagagaattataaattcagattggttgggaaaaaaattacacgctctttagggattctcttctcctaaaataatactaagcaactcagtggggtctttttctctgattctttatgaaaagggaaatatcaattttgatctcacctgaaggaacaacattataattataccaaggagaaacatacaggcgaaaggaagcataaggaccataagaagaaattaaatcttttcaaagctangggggaaaatggagtgtcagtgccaagaaggataacacctacatacgctcaggaacttcagtggtaaattcacgggtaatatatgactattccaacacagtcttcatttattatgtttgccttgtgggcaaagtagagaaataccttacctcatcaatatgaaactgctcaaaactcagaagctacagccaatagtaatatgtttatgaaatatatatatttttaaaccctcattgcttacagatcaaagctacaactgcacatagcatcaacaactgccaattcatatggaaatctactctctgatgttgcaaaagaagctctaactgt

SEQ ID NO: 4199 - DNA, 661 bp, Homo sapiens
  misc_feature [331]..[331]: Chromosome 11, SNP identification no. = rs1512367
  misc_feature [331]..[331]: allele = t, in linkage disequilibrium with rs1512369, respectively
  misc_feature [331]..[331]: n is a, t, c or g
tcagccagaaacagggaagagggtacaggaggcccctctaaagactcatagaaggctctacattctcaacttatatatcgaagggaaaatggccagaaattggcttgggtaggggaagagaattataaattcagattggttgggaaaaaaattacacgctctttagggattctcttctcctaaaataatactaagcaactcagtggggtctttttctctgattctttatgaaaagggaaatatcaattttgatctcacctgaaggaacaacattataattataccaaggagaaacatacaggcgaaaggaagcataaggaccataagaagnaattaaatcttttcaaagctaggggggaaaatggagtgtcagtgccaagaaggataacacctacatacgctcaggaacttcagtggtaaattcacgggtaatatatgactattccaacacagtcttcatttattatgtttgccttgtgggcaaagtagagaaataccttacctcatcaatatgaaactgctcaaaactcagaagctacagccaatagtaatatgtttatgaaatatatatatttttaaaccctcattgcttacagatcaaagctacaactgcacatagcatcaacaactgccaattcatatggaaatctactctctgatg

SEQ ID NO: 4200 - DNA, 661 bp, Homo sapiens
  misc_feature [331]..[331]: Chromosome 11, SNP identification no. = rs11037273
  misc_feature [331]..[331]: allele = c, in linkage disequilibrium with rs4755702, respectively
  misc_feature [331]..[331]: n is a, t, c or g
gatgtacaccttctttgacattgagagtaatttcattttctcacctcctggatattacaaacaatatcacaaggggttgtacataccctgcaatattgaaagtattatcatcctctgcctctttgaatattaaagaaaaatcacaagggtggtgtacactttctgccatatgggaagtaatatcacgctcttccccacctggatattaggagaacaaagggggtgtacaccaccttcgattttgggagttatatcatcctctccccctttgaatattaggaaaaatatcaccgagggggtgagcaccctctgtgatattgggcataatatnattctcttccccccggatattaggaacaatatcacagaagggtgtacaccctgtgatattgggagtaatatcctctccccacctggatattaggaacaatatcacaagggggtgtacagctcctgtgatattgggagtaatattgtcgtctctctccctaaatattacgaacaatataacaatatcacagggaggttatacatccccttgtaatctcatcctctctctttctggattttaggaacaacatcacagaaggggtgcacactcccctcgatattaggagtaatatcatcctctcccccactggacattatgagccatatgaca

SEQ ID NO: 4201 - DNA, 661 bp, Homo sapiens
  misc_feature [331]..[331]: Chromosome 11, SNP identification no. = rs11037284
  misc_feature [331]..[331]: allele = a, in linkage disequilibrium with rs4755702, respectively
  misc_feature [331]..[331]: n is a, t, c or g
atcgcaggtggtgtacacccctcctgttatattgttcttaatatccaggtcaaaagaggatgctatcactctcgaaatcacagggagtgtacaccccgcctgtgatattgttcctaatatcccggggaagagaggatgatattattctcaatagcgcaggatgtgtacgcccactttgtgatattgttcctaatatccattggggggagaggttgatattactcccaataccctttcatgatatttttcctaatatccaggggggaagagcatgatattactctcaatatcacagggagtgtacaccccttctgtgatattgtttctaatngtcagggggtcagagtaggatattactcccaatatcacagggggtgtacacccccgcatgacattgtttctaatatccagagggggagtggatgtcattaatatgcataatcgtaggaacaatacatcatcccctgtgatattgctgctaatatccaggaaagaagaggacgatattacttccaatattgcagggggtgtacaccccgcctgtgatatagtttcttatatccataagaaaagagaataatattactaccaatatcgaagggggtgtacactgcccctgtgatattgtttctaatatccaggttgggagaggattattact

SEQ ID NO: 4202 - DNA, 661 bp, Homo sapiens
  misc_feature [331]..[331]: Chromosome 11, SNP identification no. = rs12789205
  misc_feature [331]..[331]: allele = g, in linkage disequilibrium with rs4755702, respectively
  misc_feature [331]..[331]: n is a, t, c or g
ctaatatcccggggaagagaggatgatattattctcaatagcgcaggatgtgtacgcccactttgtgatattgttcctaatatccattggggggagaggttgatattactcccaataccctttcatgatatttttcctaatatccaggggggaagagcatgatattactctcaatatcacagggagtgtacaccccttctgtgatattgtttctaatagtcagggggtcagagtaggatattactcccaatatcacagggggtgtacacccccgcatgacattgtttctaatatccagagggggagtggatgtcattaatatgcataatcntaggaacaatacatcatcccctgtgatattgctgctaatatccaggaaagaagaggacgatattacttccaatattgcagggggtgtacaccccgcctgtgatatagtttcttatatccataagaaaagagaataatattactaccaatatcgaagggggtgtacactgcccctgtgatattgtttctaatatccaggttgggagaggattattactgtgaataacagagggggtaaacaccctccttgtgatattgtttttaatatccagggggtgagaggatgatattactcccgatatcgccggtggtgtacaccccccctgtgata

SEQ ID NO: 4203 - DNA, 661 bp, Homo sapiens
  misc_feature [331]..[331]: Chromosome 11, SNP identification no. = rs11037307
  misc_feature [331]..[331]: allele = a, in linkage disequilibrium with rs4755702, respectively
  misc_feature [331]..[331]: n is a, t, c or g
atgatattactcccaatatcgcagggggcgtagaccttctctgagatattgctcctaatatccgaaggtggagaggatgatatttctctcaatttctcagagggtgtacaccacccctgtgatattgttcccaatatccatggggtgagaggatgatattagtctcaatatcgcaggaggtgtacacttcctagtgatattgttcctaatatctagggactgagagaatgatattattcccaatatagcagtgggcgtacaccccttctgtgacattgttcctaatagccagcgggggagaggaagatattactttcaatatcgcagggcntatacacccaattgtgatattgttccttatatcccgggagggagacaatgatacgagtggcaatatcgcaggcactgtacacacccactgtgatattgttttgattatccagaggggaagaaaatgatattactcccaatatcacagggggtgtacatcctcctgtgataattgtttcttatattcaggggggagaggataatattactcccaatattgcaggggttgtacacacctcctgcaatattttccctaatatcctgaagggaagagcataatatgactctcaatatcgcagggggtgtatacctcctttgtaatattgttctt

SEQ ID NO: 4204 - DNA, 661 bp, Homo sapiens
  misc_feature [331]..[331]: Chromosome 11, SNP identification no. = rs10838050
  misc_feature [331]..[331]: allele = a, in linkage disequilibrium with rs4755702, respectively
  misc_feature [331]..[331]: n is a, t, c or g
ccagcttcagcaagggtttcaagggagtatgaggaagagcatttgggtatacattcaagacatgagatccaatccaagcaataatcctgaaattgtaatccctgactattacatatatatatgtttctcaaatgatccaggattcaaatgcaagagactaactgattaactaaccactaaaatcccaaattaaaattttcctcatgtatctccaaagagttgttctaaggattcaaaaagataaggaataagaagtctttgcttccccattacatctccagaaaaaaggtgaatttcttagaagccaagccaaccaagctccaaggcaaantgaagaataccatttattctggggattctcttagaaaggcatgttttaatcatgagtttcagtaattacttaattagcatggcatttttacctccctggcctaatgctgagcctcagaattctaatggaaattttccttcagccgaattcactcctttcaagaagatgctcaagatggttttgttgttcagtttgttttttggtaaagggagaggaaagtacaaaagaacccatcaaacatggaaatcaaagccagagtgaagctgtgaactgtaaggcacaaggcaagaggaagggtagcatggcggttaaatatcagctttggaacca

SEQ ID NO: 4205 - DNA, 661 bp, Homo sapiens
  misc_feature [331]..[331]: Chromosome 11, SNP identification no. = rs12808373
  misc_feature [331]..[331]: allele = c, in linkage disequilibrium with rs4755702, respectively
  misc_feature [331]..[331]: n is a, t, c or g
aacaccctcacagacacacccaggatcaataatttgcatccttcaatccgatcaagttgacactcagtattaaccatcacaaggtggaaggtgagatcagcagaaaggggctaaccctgaactggtagaactcagagtttgagggcaggggttgatcattggtgcccagccacagtagcactgctggcaaaaaagaaacgaggtgcatcagagaaatctttccagatgaggacagccccatcctttcctggcctccaaccctggaggagccagagatagcacggttagtgggcaagggagaggagaaaagcaatatgaagaagtagatgancatgctccttccttgatgtaagctcaaagcctgcctcaggcctgagctaagggaagaaaataatttcataatcagatgaaaacgtgaagttgatattagactgaactagacatttataactgaaaaaaagagatagaacatttatatccaagatggatgagaaaggcaatgctacctagccaaatctcatttggaatcttggaaaaaatgactcagtggagcaagtttaacagaaactggtgagaaagaaaagttgctttctgctcgtgaccaccaccaagttcagggggggaaatgtgttacttacaagtgtcttgctttaaaaaacaa

SEQ ID NO: 4206 - DNA, 661 bp, Homo sapiens
  misc_feature [331]..[331]: Chromosome 11, SNP identification no. = rs7935232
  misc_feature [331]..[331]: allele = g, in linkage disequilibrium with rs4755702, respectively
  misc_feature [331]..[331]: n is a, t, c or g
gtgggcaagggagaggagaaaagcaatatgaagaagtagatgaccatgctccttccttgatgtaagctcaaagcctgcctcaggcctgagctaagggaagaaaataatttcataatcagatgaaaacgtgaagttgatattagactgaactagacatttataactgaaaaaaagagatagaacatttatatccaagatggatgagaaaggcaatgctacctagccaaatctcatttggaatcttggaaaaaatgactcagtggagcaagtttaacagaaactggtgagaaagaaaagttgctttctgctcgtgaccaccaccaagttcagngggggaaatgtgttacttacaagtgtcttgctttaaaaaacaaataaataaaattaaaattaaaaactacatgattgattttaagataatcaaatcctcacaaggcatgtgtttgcatatcaggtccctgccaatcttgtgaactccatctcaagctaacccccacctacacccacacaataactccagccaggtagatttctggaagcttctcaaaatataagctgcttatcacctcaggcacatacttttccctttgcctttgaattgcttgcctcttctcatcctcacatggctaatttctccttattcttggagtgcttataggca

SEQ ID NO: 4207 - DNA, 661 bp, Homo sapiens
  misc_feature [331]..[331]: Chromosome 11, SNP identification no. = rs11037325
  misc_feature [331]..[331]: allele = c, in linkage disequilibrium with rs4755702, respectively
  misc_feature [331]..[331]: n is a, t, c or g
gattcctgcatttccatcttgagttcagatttccaagaggactcagatttggggttatggtcttgatggtgacagttacatcatgaggcagaggcacatacattaaagacatgatccgtgatcatgccaattgagggccagtggaagatgtattcaatcattcaaggagcatccaatgccttctaaagctgcttgggagtgaggccatcatcagctcaacctgctggagttattccttgccctgtggagcccacctcaaatgccatttagagcccaaccaggaaaaaaaaaaaaactaaacctcaacacctcaggagcagtagaacagggnagaatctgcctcatttatcactcccgtctgccccaacatcctacagtgtgtaaaattaggcaatgtcttgcacatacacaccactccaaattcctagagctgcaagtctcatctatatagaaggaaaatatggagaatttttaaatcaaataggagatttagactttaaaatacacagagataaatctcagaaaatgcaacaagtctgttctaataatggaatatggctgaaaagtaatgaagatgccaagatactgtcccagtggaaaaggagctttcaatacagtacaactggtactagttaacagaaaaaaagtgaaaccatttggg

SEQ ID NO: 4208 - DNA, 661 bp, Homo sapiens
  misc_feature [331]..[331]: Chromosome 11, SNP identification no. = rs977368
  misc_feature [331]..[331]: allele = t, in linkage disequilibrium with rs4755702, respectively
  misc_feature [331]..[331]: n is a, t, c or g
tttaaagttcagaaaatttcagagacaaatataggaaagagctatcaataaagaataaaatttcatcatattcacatcagctttaaaatataaaataatttaaatattacaaataaagttgaattctactttgtccatttctcagaatgcctctacttcccttcatggaggcattcactatcttgattttggtgtgatttaatgctttcacaatatatccatataaaaaaatgtagtcctagcttgtatttttaaaaattacatagtttgtttcatagtgtgtggtttttcaactatcttttctcactaaacattattttagatgttttcntgatgataaatcatgatccagtttgttcattttctcttgctgcattataaaaatttaacatattttatgcatctcaacactaataattagacatttgggttgtttccaaatgtttgttttgatattacaaacaataatgtgatgaacatctttgtgtcttggcacaatgtggacaaatttctctagaataactaatagaatgtgtcagaattgacactgtgccagtctgggcctaagaaagcaaggcaagctctacttttgctctttagaggaagccagtttctatgtaagagatccaagtactctgagactgccatgctgtgaggaagt

SEQ ID NO: 4209 - DNA, 661 bp, Homo sapiens
  misc_feature [331]..[331]: Chromosome 11, SNP identification no. = rs11037342
  misc_feature [331]..[331]: allele = a, in linkage disequilibrium with rs4755702, respectively
  misc_feature [331]..[331]: n is a, t, c or g
ttgagcttctccagaaatttgcctatttggtggagacagaaaattggtctagcttttgataaccaagcccaattcaagattcaagccccatctaaactcagtcactggaaaggccatttcttagaaccatcaccaccaatactgccaccaatgaccgaaaaaaaagattacaaatgtacttacattgttaaacatgttagatgacatttagcatgtatctactaccattgtttaaagaatctgaaattccctactttgtttcaacctggatgatccagagctttttctcaaataaattttttccttcattactatatgctttctttagagngcccgaatatcagatcttagagcttctgtcatttgaaacaatgttaggaaactcaataccaaaaaaaaaccttagatttatagctttgtcatcaagatcaccaacttccttctggaacattaagacagtatccactggtattcaaagaaggaaaagaaactaatattaattgtgtatctatgtcaggttctgtgctaaacattatattatctcacattatactcaaaataaccctacaatataggaatttctgtttcctcaattgaaaaatgaacaaatgaaagtaagtttatgtaattgcctttaggcaatacagctagtaaaatataa

SEQ ID NO: 4210 - DNA, 661 bp, Homo sapiens
  misc_feature [331]..[331]: Chromosome 11, SNP identification no. = rs11037344
  misc_feature [331]..[331]: allele = a, in linkage disequilibrium with rs4755702, respectively
  misc_feature [331]..[331]: n is a, t, c or g
cagaaaataactgtattcagatagtcatattcaaattacttgtttttataaaattaatgaaatcaaacaattcatatctatgtatatcattcctataaatatttatctgttacacatatacactagtagcacaagaggagagaattaaatttttccctaaaagccaatttggaacaagtcatgcaacagatacaaattttctacgaatccaaaattaacattaaattagtcttcaattacaatttcttgtagaaacggatcggttctaacttagcttccttctaatgccccttctctctaatacactgaaatttctctggaagaggtgatnattctgccgcaacttgccaaataaattttgaacaccttgagcactttgttaataaaatgacacagtaaggcatctaatgccttcaggcctagaatagactttgggagaacagcccatgatctcattcccattaagtccaagataaaatggctagggggcagaaaatgagtcaatggagcctgaggtctctgcccttatgaacctcatggtagcaaaggcatatggatctcatcacttttcactctgcaaacataattagtggctgacattaatttgttcttgttggaaagaaacatcgtttcacttttgttttaataacagttatgcctc

SEQ ID NO: 4211 - DNA, 661 bp, Homo sapiens
  misc_feature [331]..[331]: Chromosome 11, SNP identification no. = rs12365397
  misc_feature [331]..[331]: allele = a, in linkage disequilibrium with rs4755702, respectively
  misc_feature [331]..[331]: n is a, t, c or g
gacactttcactgtctctgaaattacattgttgtaaacacagtaaaatgtatttctatatgaagggaaaattaataaccaactttcatataagttaatttcctctttttcctgtggcttttcagtgtttctattgcattcataaaattaatgtagagagctctcgaaaggataattaaataaattactttagtttttacccagtgagtatgtagcctacaaaataatttctctttagtagcttgtgagttacactggtctattcactatgtgtttggagtactactgataatctctcttacaaatcttaaactacaaaaacatcttctcantataggatgatctatttgatacaggctcaattaaacccagaatttgttttaaatgagctacaggtacttcaggcaattcatcatttgatttttgttataattcagcaagtggcctatgctcttggcaaaagaaccagactgcttcagtaccatggatagtgtctggtttccacccccccaccccccgacacccttagtccctacctttgggttgtctagtatatgtatctgcaactttcttggtcttcacaatttctggcaataaatacacaaactcaatgctaagtgtaagaataatgtttatgtgtgagtcagcagttaagaatcaag

SEQ ID NO: 4212 - DNA, 661 bp, Homo sapiens
  misc_feature [331]..[331]: Chromosome 11, SNP identification no. = rs7926780
  misc_feature [331]..[331]: allele = g, in linkage disequilibrium with rs4755702, respectively
  misc_feature [331]..[331]: n is a, t, c or g
ataactttatcagaaaagagaccaaaagttgagtcaggcatgttaaaaatgagaatctattcaaattttcttcctccatctactgtcttactgttctaaaattcatgcatatttcttaggatttcaactcatctcaacagatacttattaagtaactatgactaatgtaaaagggtctcttttaactcagtcaaactaaatcagaatttgagatatttttatctcatcataaaagctactaggttctaggtcttaaggtctttgtgaagaattctaagatagttctcagactgtgatcataaatcttagttcaggcagtgtaaaaatatcncttcaaaaattatttttaaaaatcctaaagattattttctcaaaatgactgtgatattataatgttaaccagaataagccaatataaaaatgatattccttcattctaaaaggaaagaaatgcaggtctaaaatcccttatcagaaattcgtggagtcacatatggttcagaattcaggatttttttacattttagaaatatattaaattgtacattatgtaccaccccttgtagagtctgagacaacacaaataatcaaacactagtattaattcaccaatacctattaatattcacacagggtggaaaaagactataaatagcttcac

SEQ ID NO: 4213 - DNA, 661 bp, Homo sapiens
  misc_feature [331]..[331]: Chromosome 11, SNP identification no. = rs11037360
  misc_feature [331]..[331]: allele = g, in linkage disequilibrium with rs4755702, respectively
  misc_feature [331]..[331]: n is a, t, c or g
tttctgaacatattaaacccccaaccctctcctcctgtagggagaacagtctgttgactttggatccaattgaattgaaacagcctgtatccaggtgatatccaggatgtctactcgggaggaatccagacaccgaggaaagcccaatctggtgctggggaataacttggcaggcacagaaatatacagggagagaaaaagctgcagacaaaagtgtccaactaatgggaaaagccactgaaagaataggaaccagaatcagatgatgatgatgatgatgatgatgacgacgacgacgacaacaacgatgacaaagaagatggtgatgagnaaactgaatcacagagtagttaagggaattggttatgttcatacagcaggtaagggatataatttaaatttgaatcttagaaatctggctccaaagcttttgctcttaacccaaaaacaatgagctgtacacaattcccagtccacacaaaagtggaagggcagcctacttcacctctgtgagagcagatccagaaacctgccttatgtctaccactcagagcttggccttcacactcaactactatttctcactccaaaccaggtttcctgactgctcaaagcaaccagccctgtttgtgatgatatgggtaaataaatccctgtggac

SEQ ID NO: 4214 - DNA, 661 bp, Homo sapiens
  misc_feature [331]..[331]: Chromosome 11, SNP identification no. = rs1353465
  misc_feature [331]..[331]: allele = g, in linkage disequilibrium with rs4755702, respectively
  misc_feature [331]..[331]: n is a, t, c or g
cccaaaattcaggaggctccacaaggaccataaacagcaggacctgtaaataaaagtttgtctattctctcttatggactattgagaagagagtttgtcagaagaagaaaaattctttaagacattattttcagcaaagctgtcactgttttgaaattattaggcccaaagttaaatgtaaaagcactgaatactttccatggttttatataaatgaatattatctaggtcagcttttaagttttaatagtataattaatacatctcctttgtgtgtgtgtgttttttaagttttccatcctatttaatgtgactttattacaccttgaanccatgtgttccctagagtgttcccggctccagactgggccctcttctcctttctgtttataatagggggattcccagtgcactagaaaacatgtatatgctgataattttctaacatttctctctagtctttatctctcccctgagggccagactcgtagatccacttgctccctggatacctccattcaaatacataatccacaactcaaacatgacaggtctaaaatggaacttttgatttctacccagaattaaacagtttagaaggtgcattaaacacaacatttctatgagcctttcataggccggtgcatgttgttaatttcca

SEQ ID NO: 4215 - DNA, 661 bp, Homo sapiens
  misc_feature [331]..[331]: Chromosome 11, SNP identification no. = rs11037365
  misc_feature [331]..[331]: allele = c, in linkage disequilibrium with rs4755702, respectively
  misc_feature [331]..[331]: n is a, t, c or g
gatcatgaggtcaggagatccagacgatcctggccaacatggcgaaaccatatgtctaccaaaaaaaacaaaaatacaaaaaataactgggtgtggtggcatgtaactgtaatcccagctactcaggaggctgaggcaggagaatcacctgaaccagggagtcggaggttgcagtgagccaagatcatgccactgcactccagcctggcaacagaacgagactccatctcaaaaaaaaaaaaagagagagagagaagaggttgtcagtctggccacagcctatgtctgagagtttttaaaagacactgacattggccaaacttttaatgangtacattcttccaatttagcattcagttttaatatatgtaattttcaaactgcatcctttcaagattggcagaaaagcttttttcctgaatctctccacccacctcatgccccccactatgtctgtgcctttcccctaggtctgtgcaatgtctaccattccaatcccatgtgagtttttaaaagatgacttccattttgtatctatgtcatgaaatcataaagatgaggagatgaggggataaattgccctgcttcttccaggaaaaagtaagtgcattcctacaaaatgatggtggcagtgactcagcagtcagaggccattatcata

SEQ ID NO: 4216 - DNA, 661 bp, Homo sapiens
  misc_feature [331]..[331]: Chromosome 11, SNP identification no. = rs2132484
  misc_feature [331]..[331]: allele = t, in linkage disequilibrium with rs4755702, respectively
  misc_feature [331]..[331]: n is a, t, c or g
ctttagttcccactctggtttagccacacagttattctgtgctcttctaagttaattaactgctaagagctttagttacttcataaatgaaacaagcaccaccaaacccaacttgaagggtcacggtgagaattatttatttttgtatttatgcatttaatgtacctaggcagtgcctgtctcataggaggcccttattattagagaattaactcttcagccccacagtacaattttaaagcattaccattttaatatttactacattttaagtcctgcaggaagctgcttctaaaaaagagaagatttataatctgaatagattagagtntcataaagcacaatgaagcatgcaacaggctctataaaaaaccataaataaggtaccatgcatgcattatgccgtcaactgtcgattattctgtaaggaaggaaagcagatggggtcagtccaaaagagtaagtaatcaaaaaaaaaaaaggcaactcttagatttgtctcgacatttgcattgaactcagatgtatgtgatgtgatgttcagggaaagtttttaatgtgttttccataagaaatcctgacttcggacaatcggcctggtcacagcactttcctacatctgctcccacacaggcaccaggcagctcctcaagcaggctga

SEQ ID NO: 4217 - DNA, 661 bp, Homo sapiens
  misc_feature [331]..[331]: Chromosome 11, SNP identification no. = rs11037366
  misc_feature [331]..[331]: allele = g, in linkage disequilibrium with rs4755702, respectively
  misc_feature [331]..[331]: n is a, t, c or g
agatgtatgtgatgtgatgttcagggaaagtttttaatgtgttttccataagaaatcctgacttcggacaatcggcctggtcacagcactttcctacatctgctcccacacaggcaccaggcagctcctcaagcaggctgatccaaaaaaaaagcagtgtgagccgaggtttcactcactcaaacctccccagccatggagacagctccattccttggataatatctgcatgtgcaataagtacacatggaatgaatatggaaataccaacagagcaagtgattaggaatcaccacagataaagcaaaacatatgtaattagattataganatttgggtgtgctgtcctttggcaatagtttatcatattagtttgggcatgacagaaaaccagcagcagagatgatgttagtgtggtgtaggtactaaagtgaacatccgtaggaacacagccccattgagcacttgtgttgagcttggcattggtaattagagacaaagacggcacttcagtcccatggagactgtcaaactgtaggcctatattttgaaactccttaaaaatgcaatctcagctctatagaaaataagcctccattggcttaaaaagctatcccaagtgagcaaaagtctcctccaggccaaaagaaaaaaaaaaaaa

SEQ ID NO: 4218 - DNA, 661 bp, Homo sapiens
  misc_feature [331]..[331]: Chromosome 11, SNP identification no. = rs1874435
  misc_feature [331]..[331]: allele = g, in linkage disequilibrium with rs4755702, respectively
  misc_feature [331]..[331]: n is a, t, c or g
ggccatttgttaaagcaatttatttcagtcatttaagttacaatttaaaaagaaccatcataagccttcacaaccttttataggtgacagaccacacaaattatagcacattgtccctgtttctttaaaaagcaaattactctggacccatagagaatgctaggtttaatgttcagtaacaggacttgggcataaactagaccagctgacatctgcaaagcaggcaccggttaggctgggaggaaagagaagaaattcacttacacttagaagtcttccttgtggtggggagaaaggaaagtttggggtaaagttttaaatgtagcaaacnctcaagagaagatgcttagggtggacaaaaagaacataagaacatgtaggatgaggtataattattggaacaaaagtcagttcagacagaagctctgggttgacatttactcctctataagattaatgagaggaaaaaatgggtagctagacgaagaggtaaaactcttactcttttagtcctcaataaagggtgctaaatccccttacccatggcagtgtttagggctttgcccccctctctctgatgcttacttttcaaaggcaataaactgacaaaagctgccatttccaagtacctgtaactgcccagccctctctaatcctggcc

SEQ ID NO: 4219 - DNA, 661 bp, Homo sapiens
  misc_feature [331]..[331]: Chromosome 11, SNP identification no. = rs11037372
  misc_feature [331]..[331]: allele = c, in linkage disequilibrium with rs4755702, respectively
  misc_feature [331]..[331]: n is a, t, c or g
ccctgatctgtaatcagataagcaatgtacaaattagccatgggatggctttcttagccacatttgagaaaaaagttcaacggacactgtttcaaaaaggaaaaggaaataccaaatgcctttggtgtcagatacacatggatttcattccttgctgtggcacatgtggttgagtgatcttaatccctctaaacctacactttctcatctgtaaaaagagagtgttgaaacctatgtcacagagtcatcgtgaagattcagaattagagattatatgcattcccaactaagaggatgcctagaaagtatgaggcattcactaaatagctgntattatcattatcaccatcatcatcatcaataacactattagtgttattaacccataaatttgtgatgcttcttacagaaaatgcaagctaatgtttccagctcaaaatatgagagaagtggcaagccagagagaaaaatcagatccactagagaccctccacctcggtaccacagccttatgtctgttaaagtagatttttttcaccaacacctgaactccttttctgtaattgaggaatctaccactatatgagagagggcagatctgtcctccagctttagatctttctatctttcaaatctttctatctaggattttgaagctggt

SEQ ID NO: 4220 - DNA, 661 bp, Homo sapiens
  misc_feature [331]..[331]: Chromosome 11, SNP identification no. = rs7481999
  misc_feature [331]..[331]: allele = t, in linkage disequilibrium with rs4755702, respectively
  misc_feature [331]..[331]: n is a, t, c or g
atgaggtttaaggaaagaagccatctctataaaacaaaagtgcaaggtccgaagcagcgagtggtgatgtagaagctgcagtaacttatgcagaagatctagcaaatgtcattgatgaaagtggctcaattaaatgatatatttttaatatagataaaacagccttctatcagaagaagatgccatttgggactttgatagctagtgagaagtcaatgcctggcttcaaaacttcaaagacaggctggctcccttgttaggggctaatgcagctggtgatattaagtcgatgtcaatgcttatttatcattccagcaatcctacagacctnaagaattacactaagtctgctctgcctgttctctataaatgcaacaacaaagcctggatgacagcacatctgtttacagcatggtttacaaatattttaatcccactgttgagacctactgctcagaaaaaaaaaaagattcctttcaaaatattactgctaattgacaatgcactagtcacaagagctctgatgaagatgtacaagaatattaatgttgttttcatccctgctaaaacaacatgcattctgtagcccatgggtaaaggagtcattttgacttccaagtcttattatttaagaaatacatttcataaggctatatctccc

SEQ ID NO: 4221 - DNA, 661 bp, Homo sapiens
  misc_feature [331]..[331]: Chromosome 11, SNP identification no. = rs1496222
  misc_feature [331]..[331]: allele = t, in linkage disequilibrium with rs4755702, respectively
  misc_feature [331]..[331]: n is a, t, c or g
gccaacacagagacatgtgaacaagcccagctgaactaagcagagttcaaaccaagctcaaaccaatcaatctcagacatccccatccaatccacagatgcaggagttaagtaaatgctcattgttgggcatgtttcgtatgtaacagtaattaaccagtataacaccagagttccaacttcctgacaaaagctcaaacttatctattggattttttttttcccagagataagcaaatggtagacaagatatagagcccaaagaaatgtcattttctacattttcctctttcctcttcatttctcctcctctctccagttccagaggtctngtccaggttgtagttagaagctttgcccccactcattatttagtctctttgagacacagattatttgttttaaccgcattctattgtgtcagtccttctataagacagtaagcttgaaattccttatctgagtgaatggaggctaaaagtataaggaatgggaggtgaaggaggaaatgtcccttaatattacaaaatagtatccaatcatatttgctagggcagaatttgctaatatgggagttttataatggcttagaaccctcaaagtgtcaatgcatatagggctcccgaaaggaagttccctctttcataccaggtacatttgga

SEQ ID NO: 4222 - DNA, 661 bp, Homo sapiens
  misc_feature [331]..[331]: Chromosome 11, SNP identification no. = rs1353461
  misc_feature [331]..[331]: allele = c, in linkage disequilibrium with rs4755702, respectively
  misc_feature [331]..[331]: n is a, t, c or g
caaggctgaggctcagaagtggtaccttgtcacttcaacccacattccattggccaaagcaaactgtacagccaagtcgaatatcaatgtgtgggaaattcttctcctcccatggaagacgtggggggaagggaatgaatatgtgccccaaaataagctaatctatcaaatactccaaatataaaatggaagcgactgcagctgccctggttgatggttgagacaagccagcccagaatcatcccccaaatctcgtttgtctctcctgcctcctatggtggttcctgggctacttcatcagaaactagtgctccaaaggacacaactttanaataaaagcaagtacttacattttccctggatatgatactgcaagtaccaggttcacaagtggggattgaattctaggctgagataacataataaacaaaagatgtttttaaaacattttctccctagctctaagtaccattcttggcacattgtaagtaggtgacaattaatgtttccaaaaaggtgaataaaaatcatagtgaaaacataaacttaacagtcacttggctaaagagtctataaaactttcagctagttttacagtttaaatttatcacaaacaccattggtacttataaagtatacggataaagttcaagagagcttg

SEQ ID NO: 4223 - DNA, 661 bp, Homo sapiens
  misc_feature [331]..[331]: Chromosome 11, SNP identification no. = rs17500748
  misc_feature [331]..[331]: allele = c, in linkage disequilibrium with rs4755702, respectively
  misc_feature [331]..[331]: n is a, t, c or g
ctagtgggtgtagggcaaggatgctgctaaacattttccagtgcattggacaactctccacaacaaagaattatccagccccgactatcgatagcaccaaggtggagaacactggcttaggtaaaggtggtgtttgggatcaccaaagaatgcacaaataggtcccatgagagagtcagctttaaacctgccaagctcagagagcacagagccatcctaggtgcatgccaatcatagagggatattcctaacctctttacctcttctagctgccctgctcctaccctttattttccaaccctttcacaccacggtggtagaacaaaaaaangtaactacagtatcaagaagggaaggaggcatggtggtgcatgcctataatcccagatacttgggtagctgaggcagtatgatcccttgagtccaggagtttgagaccagcctgggcaacatagcaagaccccttttcaaaaagaaggagaaaacaccaggatttagctgcctggatggccttgaggcaatcttttgtggtgtttcgcggcattggggaaaggaataaaaacaaaaaaagaagggagggaagatggaagtgtagtgtgtagaaggggataaagaagacaacacccttatccatgaaaagtgactagtttgcaacaggccc

SEQ ID NO: 4224 - DNA, 661 bp, Homo sapiens
  misc_feature [331]..[331]: Chromosome 11, SNP identification no. = rs1532408
  misc_feature [331]..[331]: allele = c, in linkage disequilibrium with rs4755702, respectively
  misc_feature [331]..[331]: n is a, t, c or g
agaaaatataagatacacataagagaaatgaaatactgtatataaaacaaagttgtatgtgactagtttcaaagtatcagcatgcagcaagcatgctggaattcaggtggcactccagatgatgaaactacagatgatggaactccagaagataaaactccagatgacggaactccagacaatgaactggggtgatcagggaagcctccaggaggagggctttgaaacttacaccttattcagggctttgaaatagatttccaaaaagcatccaagtcctgatccttccatttgatctcaggatcttgttattgcttttagaaaagccagngccatctgtttttggaagctggcacccacacccagctgttaatttggaatcctaaaccactttaaaaattaatggctttataaaaggtctgcaactgcctcttaagagtttaatatcatatttataaactcagtctgtattgagttccagcatattgcaaataatttacagtgttttcctgcacagagcataactaatgtggatccacagctgtgcagataacttttcctatcaacagatgataaactgtaagtggccccatttggatgtggggaaatagtccagatttttaaacctgcatttgtgccactgggagggaattgctatagc

SEQ ID NO: 4225 - DNA, 661 bp, Homo sapiens
  misc_feature [331]..[331]: Chromosome 11, SNP identification no. = rs4755702
  misc_feature [331]..[331]: allele = a, g
  misc_feature [331]..[331]: n is a, t, c or g
agaaatgcagccagccatgtagattacattgcacagcctcttttgcaactcattgtgacctaggtgactaagttctcatcacttttcactaatggaatgtgagtagaagtgacatgtgccacttaagatatctgagaatgtcttctgggaggctatattccatccttttgtcagctagaatcttgatgtagcaacaaatccagcatcattttatttatgcagctgatgacaatgtccctggagatagaggagtaacaacttacaagaaacttgggttcccaaatgaccaagagaagcagagctttttcctgacctgaattgctcacatcanaagtaatatgcaaaagagaaatatacttttgttctttaaactgctcagttacagcctaccatcacctaacaaatacactggggcaactgaaggcgcagtcaccattcattagaaaacgaggtcaacgaatacttcactctggtattttgtggaaagaatccaaagtcagtcctaatccctccctcctcagtccctccatggccctcagcctcagagggaaaaataaagcaatgatctgactccttgttaagaggattttggttaggaaggtggggaggagaaataccactctctgtaaacactttgtaaatatacttattcatactggta

SEQ ID NO: 4226 - DNA, 661 bp, Homo sapiens
  misc_feature [331]..[331]: Chromosome 11, SNP identification no. = rs12577356
  misc_feature [331]..[331]: allele = c, in linkage disequilibrium with rs4755702, respectively
  misc_feature [331]..[331]: n is a, t, c or g
aaaagaaaatgagaagttttgtcacatgatgcctgcagtgtctacttgaaaacacacacccccacttgcagttatataaagaggatttcctttttcattctacaaagttttactaaaggcctgctacatgtacacactgctatcaatagaacaatgaaaatctatgggccctgacctcaacagccatcattcagtatgcccatccctcacttagtggctctaattcactcctgaaaatcctgctactgcatgaaaagtcactaagaaacaatattttcattgattttaatggaaaaaaataggacgtatttcaccgtgaccaataatactngaacacagtgatacttgaacaatttgcaatgacagaataatatctcaattgaattgtgaaaccaagttttacgagtattaaaactaaatccagtcagttcatgaactatggtacaatcaaggcttattttacaccgtacaggatgaagagcaggcagaggcgggtggaggggggtgagagggagcccattctgggaaatgtgcattctcctttctacaccatttgcttcactgagctgtacttaaaattattacacagaagcatatatgtagggtaaaaaaaagtccaaatgcaaggggatttccaaacatggggaaataatgctcctac

SEQ ID NO: 4227 - DNA, 661 bp, Homo sapiens
  misc_feature [331]..[331]: Chromosome 11, SNP identification no. = rs11037386
  misc_feature [331]..[331]: allele = c, in linkage disequilibrium with rs4755702, respectively
  misc_feature [331]..[331]: n is a, t, c or g
caaaatggcttatataaaaagacaaaaacggagctgggcacagtggctcatgcgtctaatcccagccctttgggaggctgaggtaggtggatctcttgaggtcaggagtttgagaccagcctagccaacatggtgaagccccatttctaccaaaaatacaaaaattagcccagcatggtggtgggcacctgtaatcccagctactggggaggctgaggcacaagaatagaatcacttgaacctgggaggtgcagattgcagtgagccaagattgtgccactgcacttaagcctgagtgacagagtaagactctgtctcaaaaaaaaatganaaaagtaacaaatgctgataaggatgtggagaaagggaaaccctcaaacactgttgacaggaatgtaaattagtatagctactatgaacagcagaataaaagttcctcaaaaaactaaaaatagaattaccatatgacccaaaatgccactactgggcatatattcaaaagaaaggcaatcaatatatcaaagagatatctgtactcctatgtttactgcaacactattcacaatagccacaatatggaatcatcctaagtgcccatcaacagataaacggataaagaaaatgtggtgtgtatatactatggagtattactcagccataa

SEQ ID NO: 4228 - DNA, 661 bp, Homo sapiens
  LOC399881
  misc_feature [331]..[331]: Chromosome 11, SNP identification no. = rs7103863
  misc_feature [331]..[331]: allele = t, in linkage disequilibrium with rs4755702, respectively
  misc_feature [331]..[331]: n is a, t, c or g
agaattttctggactagcccctcacatccatcctctttttttcatacatcaatccccttagatcttttaaagaatctcacttttacggtaagcctcaaggacacaatttctttttctcctcttactttccaccttccttccctaatacaatcagctctgcaaaccagaaagcatgggacagattcatttcattgacaagcacagtattctagagagtgctaagctcagaaaaaggcaggcctgtgcaaatcctggcttgcctgctttatttctgtgtgaccttggcaagtcacttaaccttgccaagtcttagtttcctcatctgtaaagngaagattaataccacccgcttcatggtactaatgtagcatgtaaaataagcacttaagtccagatgcggtggcccatgcctgcaacctcaccacttagagaggccatggcgggtggatcacttgagcccaggagttcgagaccaccctgggcagcatggtgaaaccccatctctacaaaatatatatttttaaattatccagtcatggtggcacacacctgcagcctcagctactcaagaggctgaggcagaaagaactcttaggcctgggaattcaaggttgcagtgagctatgatcatgccactgtgctccagcctgggtgacagcaa

SEQ ID NO: 4229 - DNA, 661 bp, Homo sapiens
  LOC399881
  misc_feature [331]..[331]: Chromosome 11, SNP identification no. = rs2172998
  misc_feature [331]..[331]: allele = c, in linkage disequilibrium with rs4755702, respectively
  misc_feature [331]..[331]: n is a, t, c or g
gagaagggattaacaagagttgctcattagcacgatacggctaatgaagaaactgtgtggcgatcgcttctctggagaggagtttaaccttgggaaggatttcactggtggcggctgaggacactgatgcctttgagaaggggttgcagaaattagcctagggttgcactcactaagagagagagagccttaagtaaaggcacttggaatttgttcaggccaatctgtagggagcagatgtcgccaggagcttggggctgggatgtgagccaaggtcgaagaaggagtcaggaaaaccctagtgacagatcagcggagccagcggccatgnctgttatagaatgaaatgctggcttccaatgtttgcagccagctttgctgtatctgagaagagttggaaggaagatgaaaagatgaaaaacgcctgccaagcagatagcagtcttgcctgccacgtctgaaatggcatgtttaatcacagtggcacactttctcttgcctactaatgacagaaggaagttcctaatgaagttattgctctgctgactgaattaatgatttccagttacagggcttgtaaacacaccatgttacacgtgcacgtgttaattgaggcttcactttagagacactgactccacagataactcatcacaggtag

SEQ ID NO: 4230 - DNA, 661 bp, Homo sapiens
  LOC399881
  misc_feature [331]..[331]: Chromosome 11, SNP identification no. = rs11037407
  misc_feature [331]..[331]: allele = t, in linkage disequilibrium with rs4755702, respectively
  misc_feature [331]..[331]: n is a, t, c or g
agagctggaaaggccatggtcctagttcttggagtgacatttgactgttgaaactctacttctttttgtttgttttcaattttattttatttcagtagttttgggggaacaggtggttttgggttacatggataagttctttggtggtgacttctgagattttgatgcacccatcaccagagcagtgtacactgtacccactgtgtagtcagtcttttattcttcacccctttccctcccttcccctgagtccccaaagtctattatatcattcttacacctttgcatcctcatagcttaactcccacttataagtgagaacatatgatanttggtttctgaacaatggtctccaactccatccaggttgctgcaaatgccaatatttcattccttatgatggctccaaactctgtacttctgttacctggataaaaatgaaaagtatattgtaaacaaggtccaccctattctagtatgacctcatcttaacttacctaattacaatctatttttgtaccttttgggttgaggtaaaaaaaaaaaaaagaagaagagaaaacacagacacataagggacaaacaccacatgaagatggaagcaaagactggagttaacacacctgcaagccaaggaacaccgaagactaccagaaaacca

SEQ ID NO: 4231 - DNA, 661 bp, Homo sapiens
  API5
  misc_feature [331]..[331]: Chromosome 11, SNP identification no. = rs2279660
  misc_feature [331]..[331]: allele = g, in linkage disequilibrium with rs4755702, respectively
  misc_feature [331]..[331]: n is a, t, c or g
gtggtggacacagagggttttttaatagcataggaatgttttttgcttcccaccggacccactagcctctagtgccaccgattaatattaccttccttgaatcaggaggaaaccatttgtgacttctcatatgtaagatcttctaagggcagaaacgcaattgtctttgtattcacttccccgcccacccacaccccttccatggagagcctgcagccaagctcaagctttcaaaaaggcgtgagctaattcaatcatccttgccgcttttttgctcctccaggctgtagagggcgacaaaaaccgcggaggcgcattggggtggggggtntctactgaaggccgctcccgacgtgcgcgtctttacgtagacgtcgggggcgcagccgcgctgtgcgcggtgactggcggctgcactggcggcagctggaggtgtaatagtgcgggtagtgggtttggagaagttccgaggcggcggtggcgccggtcaggacaaggatagcggaaccgggccctgggcttgtcgctcaccatgccgacagtagaggagctttaccgcaattatggcatcctggccgatgccacggagcaagtgggccaggtgagttgagtccccgggcggcctgcagggcctggcgctccgcggcctttcgaaagcgct

SEQ ID NO: 4232 - DNA, 661 bp, Homo sapiens
  API5
  misc_feature [331]..[331]: Chromosome 11, SNP identification no. = rs11037416
  misc_feature [331]..[331]: allele = a, in linkage disequilibrium with rs4755702, respectively
  misc_feature [331]..[331]: n is a, t, c or g
tcctccaattcagtcctgacgctatctacctagaggtagcatcagattccacatgttgagggcccagtcccacaagaccacttctgatgacagttgcaagctccaagttgttttacccatgcttctgattggctggctataaatggggattcccacaatttaaccaaaccttaggtttggttaaattgctagagcagcttatagaactcagggaaacacttacttatgtttactggtttattataaaggatacatatgaacagccagatgaagagatacatagggaggggtcttgaagagtcctgagtgcaggagtttccatccctatggngttggggtgtactactctcccagcacgtgggtgtgttcttgttcatattccatcctggaacacccaacccccctcactctcatatacacacacacacagagtccttttcagtttttatggaggctccattacataggcatgattgattaaatcattggccatcagtgatagataaacctttattggtgttaaatcagcccctttctcctccctggaggtggggttggactgagttccgaccctgtaagtatgtggttggttccccaggcagtcagctcccccatcctgtggttatctagagactttccaaaaatcacctcattaatataa

SEQ ID NO: 4233 - DNA, 661 bp, Homo sapiens
  TTC17
  misc_feature [331]..[331]: Chromosome 11, SNP identification no. = rs4755711
  misc_feature [331]..[331]: allele = c, in linkage disequilibrium with rs4755702, respectively
  misc_feature [331]..[331]: n is a, t, c or g
tgtaattacgatctcaggtttgggaaggatttcttaaataaaacaaagtacaaacaattaagaaaacagttgataaagttgcccaccttataattaaaagtttttcttcaaatgacaaaattaaaagataagctacaaactaaaagctgatacttgccatgcatataactcatagaggatgagtttatagaattactttttccataaatttctatagattaatttcttacgtatgtatgtatttatttatttatttattcatttttgtgagacagggtctcactcttgccccagctggaaagcaggtaggatgatcattgctcactataanctcattgcctgggctcaagcagtcctcctacctcagcttctccagtagctaggactacaggcaagcaccaccatcatacttggctaactttgtttcatggggatggggtctcgcagtattgccaggctggtttcaaactcctgaactcaagtgatcctctaggcttggactcccaaaatgctaagattataggcacaagccaccacgccaatcctactaatcagttttttaaagaagaaaagctattggggggaaaaaataagcaaacttaaacagttaattcacaaaatatctcataaacatatgaaaatatgttcaatcttattaaat

SEQ ID NO: 4234 - DNA, 661 bp, Homo sapiens
  TTC17
  misc_feature [331]..[331]: Chromosome 11, SNP identification no. = rs7951848
  misc_feature [331]..[331]: allele = t, in linkage disequilibrium with rs4755702, respectively
  misc_feature [331]..[331]: n is a, t, c or g
tgtcatcagtgacccatttcttctttttctttttttttttttttttcttcactctgccatccacagtattggtttcatccaaaagcttggtttttttcatggtcatgacagccagcagcaactggaacaacatgattttttgttcatatgtaacgtaagagcctaagacttgcttctctttccgaaaagccccaagcaagcctcttcttgtgtctcactggctcaactggcttatacccgcccaaccctgaaccagtctgtggtaaagcaggtagaattactgacttagattaataatctgcagtagcaggaatattatagagtctaccanaatcttaagatattatagttttgttcaattattgtagtatatcattttaaaagtttatttagcatattgaaatattgaatccaaagaaatttatgagaaattttgtttctttatcaggacaaacagcatattctatggcctaaaagagcagattgtacagaaagctaccctagagtccctgttggtggggaattgccaacgtattttctgcctccggaaaacaaaggactcaggcaagtggtgatggatttggcaaagcacctgattctgcatgattgtcatctagcggttctttgagagcaccagccttggacttgaaaagttaagtct

SEQ ID NO: 4235 - DNA, 661 bp, Homo sapiens
  TTC17
  misc_feature [331]..[331]: Chromosome 11, SNP identification no. = rs11037452
  misc_feature [331]..[331]: allele = a, in linkage disequilibrium with rs4755702, respectively
  misc_feature [331]..[331]: n is a, t, c or g
cacctccctgttcccagtgcctcacagtgtttttggcacatggtaggtgctcaccaagtagttaatgaatgaagaaattccgctagtttcatggaataccatttacagagaaaatggcaaagtcatccagatccctcattctgatcagaaacaagaactgctttcagaactgaaaatcccagggggaccccctaaaagctgtcataacccaatttagcatgagaatcatgccattcgctttcatctaaaatgtggcatcacacatagggctagtcccaagatgatctcagtaatggcttatagagtgagcagccctgggctaccagcttcntgtatcgttcttgacttcagaggcgagaagtattttgccagggaggtattgccgaatatgcagatttccctctgcttcttgaagaatctgttgttgctcccagtaaatgtgaagtttgctactatgaacgaggacttatgtctctcatttggctagaagaagtcattaaaccagtagatttgggctcttcttttagagtgtaactctaagtaaaagattaaccttcaatatggcagggatcatttcccaatctttgttggcatctttaaatgttaaagagaattttaaaactcttcaaaatgtacaagtccagttgagataccggactta

SEQ ID NO: 4236 - DNA, 661 bp, Homo sapiens
  KAI1
  misc_feature [331]..[331]: Chromosome 11, SNP identification no. = rs7103310
  misc_feature [331]..[331]: allele = c, in linkage disequilibrium with rs17613700, respectively
  misc_feature [331]..[331]: n is a, t, c or g
ctggccaggcgctgctgtaccagaaaccccaggcctgcctgcaccccactgaggagcagaggggctggcctgtgtgagggatggagccatggcagtgggtctcaatacactggaaccccctggagaactgaagaaaccctgatgcccaggctgcaccccagaacaactcatcagggtctctggcagtgggggccgggcatcaacaactttcagaactcctagggtaattcctgtgtgcagccaaggctggggaccaccactctagggcatttaggagatggcagaaaaaaccttggccctcaggtaggctttccagggcctgtgacctccngaaactggaaggaagtatgtgcctgcccgtctgtgtgcatctttctagggagagttcacagcttctgtcagcttttctgacccaaaggagattaaaatccttacttgaacccaggcatttgagacaagtctgggcaataaagtgagaccccatttctacaaaataatcagccaggcatcgtggcgtgtacctgtggtcccaactctatgggaggctgaggcaggaggatcacttaagcccaggaggttgaggctgcagtgagctgtgtttacaccattgcactccagccttggtgacagagcagagtgaggtcctgtctcaacaaatata

SEQ ID NO: 4237 - DNA, 661 bp, Homo sapiens
  KAI1
  misc_feature [331]..[331]: Chromosome 11, SNP identification no. = rs16938014
  misc_feature [331]..[331]: allele = g, in linkage disequilibrium with rs17613700, respectively
  misc_feature [331]..[331]: n is a, t, c or g
acacacccccaacctgccctgcgggcaaggacagaagaggcctgagaaccgtctcttcggactcaggggcagtggaactcagactgccttcaggtggccgagaacttgaaagccctggtgttctttgtggcagtccctccatctgtctgtccatccatccatccacctacctacccctccatccctgcatccacccagtctttcatgcagcaatatttgttgggagtctgccttgttctcgtaaataacagtcttcccgtcaaggtatcacagtcctcaggggaaagggacaggtaagtagaaagtgactgcacagcatgcgttatagganctgccgtctatccacagcagaccatgtggcaggcattttgccctaatttaatgtctggacaaatctgcaaagtaggattttggggttttttttttgttttttgttttttgttttttttaggtggagtctcactctgtcacccaggctggagtgcagaggtgcgatcttggctcactgccacctccacctcctgggttcaagcaattcctcttcctcagcctcccaagtagccgggactgcaggcacccgccaccatgcccagctaagttttgtatttttaatagagatggggtttcaccatgttggccaggctggtctcgaactcctgac

SEQ ID NO: 4238 - DNA, 661 bp, Homo sapiens
  KAI1
  misc_feature [331]..[331]: Chromosome 11, SNP identification no. = rs17613700
  misc_feature [331]..[331]: allele = a, g
  misc_feature [331]..[331]: n is a, t, c or g
ccttccccctccataaggcagggaaacacaagtgggcctggtgccgtcccctccacccccccagcccagctctgcccatgcagctgtcccaggccagctgtccaggccccagctgcccggcggtgctggctccctttgccccaaagggtctgaaggctggcggctggcactcctggattttctggcctctgagtcagggtgagaacagtcagcttccagcttccctcttcctcccggggccctcccctcacctggggtcttttggagtggagggggcacagcatgcccaagcatggtttgtgtcatttcagaagcacaacttgtgtcatcngggagactgtgaaaacttggaaacaacctgtgtgtccaatcttagagtatcagttaaatgcttttatgggatggccacatctgagactttaacctggggccactggggttcctgaatgggtttcagaggtccatgaactcccagaaattattagcatcacaaaatgctaactacacatgaattttttgggggactctgtgagcccccaaatgttaataagtactaataggatggaatcctatgcaacatgtgaaactatgaagagcattttatcaacatatagagagtgaagattgtagaatgaaaaaaacaggctagaaaacactatac

SEQ ID NO: 4239 - DNA, 661 bp, Homo sapiens
  KAI1
  misc_feature [331]..[331]: Chromosome 11, SNP identification no. = rs12576112
  misc_feature [331]..[331]: allele = t, in linkage disequilibrium with rs17613700, respectively
  misc_feature [331]..[331]: n is a, t, c or g
aaaacaggctagaaaacactatacagaatgagcccaattttgattagaaccatttgttatacacacacacacacacacacacgaataatagctactaaaacgatgacagtttttaatctctggagtgagatacattttgcttgatttctgtttttctgtatttgttgggtgttctacaatgcatgtttattccctttgtaataagaagctgggacgctcagcctattttctgagaagccaaaattccccttctcgccttggcagaccccacaactcccagcccctagtcccagagggagtctgtggaacaagcacaggtctcacctctggntctctgtcaatggatcactaacttcccggccccctgacttcaaacagagtccatctgtgcaagttccagagcctgggtcatggaggtgaggggtgagggtctccctctgtcattttgctcccaccagccccagccccagccccagccccagtgcagtggctgatccggatcctaactgccaagcatcaagtgcctggcacacaagactgctcgtgggacctcatttcctagctgtgtggctttgggctagttgtctaacctctctgggcctctgcatcctctaaggcagggacagggttagtacccacctcctggggttgctgcaagggc

SEQ ID NO: 4240 - DNA, 661 bp, Homo sapiens
  KAI1
  misc_feature [331]..[331]: Chromosome 11, SNP identification no. = rs3781750
  misc_feature [331]..[331]: allele = a, in linkage disequilibrium with rs17613700, respectively
  misc_feature [331]..[331]: n is a, t, c or g
ttttctgagaagccaaaattccccttctcgccttggcagaccccacaactcccagcccctagtcccagagggagtctgtggaacaagcacaggtctcacctctgggtctctgtcaatggatcactaacttcccggccccctgacttcaaacagagtccatctgtgcaagttccagagcctgggtcatggaggtgaggggtgagggtctccctctgtcattttgctcccaccagccccagccccagccccagccccagtgcagtggctgatccggatcctaactgccaagcatcaagtgcctggcacacaagactgctcgtgggacctcatntcctagctgtgtggctttgggctagttgtctaacctctctgggcctctgcatcctctaaggcagggacagggttagtacccacctcctggggttgctgcaagggcagactgagctgatcccctcactggcctgcctgccttctctcttccaggaagctccaggactggcgggatgggctcagcctgtatcaaagtcaccaaatactttctcttcctcttcaacttgatcttctttgtaagtatgtcccatgccgtcctgaccacctccgaaaagattctccttccaggggcatcccagcctgagcctttccagagccgaccgggccgggg

SEQ ID NO: 4241 - DNA, 661 bp, Homo sapiens
  misc_feature [331]..[331]: Chromosome 11, SNP identification no. = rs748538
  misc_feature [331]..[331]: allele = t, in linkage disequilibrium with rs750348, respectively
  misc_feature [331]..[331]: n is a, t, c or g
ctggcagctggcagggtgagccgtgggacacagacgctgtcagtgagggacagcctgagtaggccccaggcctcacttctcctcccacactgtccactaaggcctcagcctggccctgtttttatctgcccctgggagccggccaccctgtcttggattccagcttaaaataatctagggcagccagtggcacactccagaagggtgagtgaactatcagattggtgactaagaaagtggccaagtgctttctgactatgggcacagaggcagccaaaatagaaaatgccattaggcagtggtgcagcactttacaatctgcacaccccanccacctaccagcaacccaggcagggaagcaggtggagcgggtgttgagggcacatgtacaagaaacagtgcggggagcttcctaagtcttcctcgtcttccccaaagcaacctgtgagtaggtgtcactgtcccattttagagatcagaaaatcaaggcctgcagggatttcatgagatgcccaaaatttaaaaacaaaacaaaacaaagtataggacaaggaaacaaaccatttttatgtttttacaggacatggaacttcagagagatgatttggctaattatttttaatcttaagcttcaagtcacagactgaagtaagcaaaagac

SEQ ID NO: 4242 - DNA, 661 bp, Homo sapiens
  misc_feature [331]..[331]: Chromosome 11, SNP identification no. = rs10838353
  misc_feature [331]..[331]: allele = a, in linkage disequilibrium with rs750348, respectively
  misc_feature [331]..[331]: n is a, t, c or g
ggggcagataaaaacagggccaggctgaggccttagtggacagtgtgggaggagaagtgaggcctggggcctactcaggctgtccctcactgacagcgtctgtgtcccacggctcaccctgccagctgccaggaccataatcttaattgtaaacctcctggcagcagctgccctgatccccacaggaagcggttgccttatcacagagcctggatcctgcccagtattcttaatctggagaaggcgctgaagtgagtcagaaaaaccttcccatccccaggacctttcttctcagggacgtttctccatcaggggaagtcgtgggcctcangcctcggtgtataagagtaaaaaatctctttaagtgcagagcaaagcagcaggggtgctgttgttcttggtttactttcaggaggacagcccagggagcagagctatttagccttgcccctcttgttagccaggaaacagataaacattatagcatcacagggaaaatataaagatgaccacaaagcaacaggcagagaggcatgtgctgtcatggaaaagctttgctggggttttggagccagaagattgggggctgagtcccagctctgcccttcagtagctgtttggcttgggggtgagtgacttgatcccccatagcctcagtttt

SEQ ID NO: 4243 - DNA, 661 bp, Homo sapiens
  misc_feature [331]..[331]: Chromosome 11, SNP identification no. = rs4755890
  misc_feature [331]..[331]: allele = a, in linkage disequilibrium with rs750348, respectively
  misc_feature [331]..[331]: n is a, t, c or g
agcagagctatttagccttgcccctcttgttagccaggaaacagataaacattatagcatcacagggaaaatataaagatgaccacaaagcaacaggcagagaggcatgtgctgtcatggaaaagctttgctggggttttggagccagaagattgggggctgagtcccagctctgcccttcagtagctgtttggcttgggggtgagtgacttgatcccccatagcctcagttttctcatctgtaagatgggcaaagagcatgcaccccacagggtggttgtaaggtcaaggtgactaccatgggaagcccctgtttgctttgaacaatggnagcccccttggaatagtgtagcctcccaaggtgacctctttgaagagtgccaggctcttgggatgtaagagctgggtgtttgtaaccaaacagtggggttaccctggagacacataactccttctgtgtgaggtctaaaaaagggctgtgagagggacctgggttgtgtcagctccctgtcctgatgtgctatcacttggagctacctcaagtatgagcagttcatcccaagcctctagctgatggctgacacttcactcacagccatctttactggagtctttctgtagatgattgttaatcctacccacaccccagaaggcgagcatt

SEQ ID NO: 4244 - DNA, 661 bp, Homo sapiens
  misc_feature [331]..[331]: Chromosome 11, SNP identification no. = rs704662
  misc_feature [331]..[331]: allele = c, in linkage disequilibrium with rs750348, respectively
  misc_feature [331]..[331]: n is a, t, c or g
tggacctcagtttctacatctatacagtggtcttactagttcctttcctgagtcccggcccagggtggctgggcagatagaatgagaagacagcgaatgtgaaggccactgcagagcacaccagcctgcactgcaggctgtaaagcccaataactgggccactcggtgaagactgacatttacaacagtgtgcccagacgccccacaggatcctctgccagcagagagattcaattatggtcattatggtgcacttaggaaaaccagggagcagctaatacattttagaaagattggcaacaacagaggttgaatcaaaacgagttttctncttaaccctcagttaaacagaaaatccatttaaccacaaggcaacaccctgtcttcccagcctccaatcacttttataaaaaaatcgtctgccacttagctttatatttttatcaccctgaaagctgccttggaatgaaaaataaattcattgatggagagaaagatgtcatcgacctctataggttagcagcctggagcaacatcctcaagcccttgctccctccagcgtggcaagaacacaatccttgtttccatccctgccaaagatgctggcggacgctggagaaagcagccccagaggcccaagaggagtgcaaatgtacacctc

SEQ ID NO: 4245 - DNA, 661 bp, Homo sapiens
  misc_feature [331]..[331]: Chromosome 11, SNP identification no. = rs750348
  misc_feature [331]..[331]: allele = g, c
  misc_feature [331]..[331]: n is a, t, c or g
ggtatgttgatttcttcttcaggagaggtgctattttccctttaaatatatgacggctgtggtctgcagcccacccacatcctcacccttaaccccagcagtagctctgtagggaaaggttatcgtgcccaattcacagataaagaaaccaaggctcgtgaagcttaatggtctcccagccagcaagtgagaaccaggatttaaatcagggccaataccacagctgtctctgctggcttcagtcccagcccctccaccagccagatgtgactcgggccaatctttccccaagtggacctcagtttctacatctatacagtggtcttactanttcctttcctgagtcccggcccagggtggctgggcagatagaatgagaagacagcgaatgtgaaggccactgcagagcacaccagcctgcactgcaggctgtaaagcccaataactgggccactcggtgaagactgacatttacaacagtgtgcccagacgccccacaggatcctctgccagcagagagattcaattatggtcattatggtgcacttaggaaaaccagggagcagctaatacattttagaaagattggcaacaacagaggttgaatcaaaacgagttttctacttaaccctcagttaaacagaaaatccatttaaccaca

SEQ ID NO: 4246 - DNA, 661 bp, Homo sapiens
  misc_feature [331]..[331]: Chromosome 11, SNP identification no. = rs860687
  misc_feature [331]..[331]: allele = a, in linkage disequilibrium with rs750348, respectively
  misc_feature [331]..[331]: n is a, t, c or g
tgcttttgaggggatctgtagcagtccttttttgcgagggtgctctctggagttctcagaagaccccaatgttactgctcacttaactcgcccttcccagcctgtgtgtttgccttaaagcccctcgttacaacacaggcagacagtcacactggcttctgttcactgtggacctactaggagcctggtccaggcccagggacattccaggcattctctctgtgggacaagtatcattatccccattttgcagatgaagaaaaggttgagcatggaaatgggagctggctggcaaactttttctcgtgccttttcctccatggttcaggcnggggcccaggaaccttcggtacacagttggtggttgaagctttggagggccagggactcagggagcagccctcatcccaggaccctcagtccccagatgggcgggattggtcaccgcagaacctcagcagctcttgggctgcactgctcaatggaactttctgtgtggattgaaatgctgtctacgtgcgctgtccaatacgagagccacttgcacatcaaactgactagtgcaaccgagggactagcttttcaattttaatgagtttaaacgtcaagaggcacacgtgactagtggctactatattggtcagtgcaggttggaggatgg

SEQ ID NO: 4247 - DNA, 661 bp, Homo sapiens
  misc_feature [331]..[331]: Chromosome 11, SNP identification no. = rs835848
  misc_feature [331]..[331]: allele = t, in linkage disequilibrium with rs750348, respectively
  misc_feature [331]..[331]: n is a, t, c or g
tcacgccagctgcttctcttcctgggaccactcttccctcactggcccactccagcatggaagggtttgacatcatccaagggctgctgcctcatcccctggtcctgatgttggcatgaggcgatgtttaagatgcctgccctggagcttccctgcctgggttcagatccaaggtcccactgcctgccccagtcatggtaagccagatgatttctctaaagctcagcttcctcatctgcaaagtggtcatgatggtatcctacctccactcatccaagcagtagggcagtgggggtacaggaaaccagctgggaggctactgcaatagtcnaagcgagttctggcggtggccagcctgacacacaggtgtgaggatcaggcatgcactggacttccagggatgagttcacaccctctcactgccacacccttactcctgccgcttctgattgtctaagcttctggggcccagaccccattttctgccccaggagccggaagaaaggatacatttcattcaccagaccccgctggagtcttgacctctcagaacctgactggcttccatgtggtttgggaccttggggtgtacaggcatgagatgcattgtgccctgagcccactgccggctggcaccaaggacctttggaggctttggggt

SEQ ID NO: 4248 - DNA, 661 bp, Homo sapiens
  CUL5
  misc_feature [331]..[331]: Chromosome 11, SNP identification no. = rs11212492
  misc_feature [331]..[331]: allele = t, in linkage disequilibrium with rs11212570, respectively
  misc_feature [331]..[331]: n is a, t, c or g
ctgaggtcaggagttcgataccaccctggtcaacatggtaaaaccctgtctttactaaaaatacaaaaatcggctgggtgtggtgttgtgcacctgtaatcccagctacttggccagctgaggcacgagaattgcctgaacttgggaagcagaggttgcagtgagccacgattgtgccactgcactccagcctggctgacagagtgagactccgtctcaaaaaaaaaaaaaaaaaaaaaaaattagccagtcgtggtggcacgtgcctgtagtcccaactactcaggaggctgaggcagaaagatccttgagcacaggagttttaagttangagcttatcatgccactgcactccaggcagggtgacagggagagaccctgtctcaacaaaaaaaaaagtacattgagaacattcttccctgatacagcaaggcagagaagtaactggtgattgagaaaagagagctggagaagatgtaccaaatcccttctaaatttgactcttcttttgataagatttctagggaattatctaactccacccccttttaccacaccattccctgttatcctatgagactcaagtcctgtttgaacctttctgacatatatgcaaaagtgatttgagtacggcagggttacaaaggtaggtttgtttttg

SEQ ID NO: 4249 - DNA, 661 bp, Homo sapiens
  CUL5
  misc_feature [331]..[331]: Chromosome 11, SNP identification no. = rs11212493
  misc_feature [331]..[331]: allele = g, in linkage disequilibrium with rs11212570, respectively
  misc_feature [331]..[331]: n is a, t, c or g
agagtgctaggattacagacatgagccaatatgcctggcccagtctcttcttttagactctagattcttttagtcattagatgagactgtataggtatgcaggagtcatttaatcattttgtaatttattctaagagtattgggaaaccattagaggatttaagtatggggtaatatgatgtgacttgagttttgtaaagatcactttagcttcttgtttaatagattggagggtttcaagagtagatttggtttagtgtgagttctggagcctgatttcctggctccaccataaacttaactgtataatcttggattgtttttccttcantttccccatctgtaaaataaggataaaatagtagtactttagaattgctatgaagataaaataagttaaaagaacttagaatagtatctggctggtgcctcatgcctgtaatccagcactttgggaggccaaggcaggtggatcacctgaggtcaggagttcgagaccagcctgaccaacatggcaaaactccatttctactgaaaataaaaaaattagccagtggtgcatgcctgtaatcccagctacttgggaggctgaggcaggagaatcatttgaacccaggaggcggaggttgcagtgagccaaggtggcgccattgcacttcag

SEQ ID NO: 4250 - DNA, 661 bp, Homo sapiens
  CUL5
  misc_feature [331]..[331]: Chromosome 11, SNP identification no. = rs11212495
  misc_feature [331]..[331]: allele = g, in linkage disequilibrium with rs11212570, respectively
  misc_feature [331]..[331]: n is a, t, c or g
agatagagctttattcttcagtttctggaaataaacttatgaagaattaccttggatgttcttaacagatgttaaaaaatatgctgaacactggcaaaaaaaagtaggggagggtttcacggtaacatgactgaataaagtctggaaatgtagacctcagcaagaacccaagaatgggatttagcaccactaattctgagcagttaataggagtagcaatgccagacatgggtcttaaaaagacccatcttaaaaagatttttaaacgcttaagaaatttttttttttttttcatgaatcattttacttaggcaatcttcagttgaacatnccttgttaggaaggaccaaatctcccagatggttgaaaggcaatatgcattgaaatgtttataacattttttaaagaacaaaaaaaaaagtaaaaataataaacataggtggagtcttttttgtttaacctagattaacacaactgttttatttgttcacaattctgtggcttagcaatttgggctggtctcagatgaatttgcctaagcttattaatgcagcagcagtgggctgttggacatggtggtctaagagagcattaaaactcatatatggtttttgatgtggctttcttttcactgtgtggtttgtcattctcaaggagacca

SEQ ID NO: 4251 - DNA, 661 bp, Homo sapiens
  CUL5
  misc_feature [331]..[331]: Chromosome 11, SNP identification no. = rs12804831
  misc_feature [331]..[331]: allele = g, in linkage disequilibrium with rs11212570, respectively
  misc_feature [331]..[331]: n is a, t, c or g
ctcagtctatgtcctcataaagtaagtatctgcctcatgaggttgccatgtgggttaaatgagatctatatgtaaagcatttagcataatgcctggtacaaagtaagtgcccattaaaggatacctgttataataatttgtttaacctctcaagctagaaatggattcaacatccttttatttccctaatccctttcatttaagcatttaccaaattcttctcagtttactttaattatgttgtcaatttagctctccttttaatcctcgttgtaacccaccataagaaatacattttatattgtggcttagaatatactgtttatttgtncatatctgaaacaaaagtcttatgaaataatattcattgttacaatatgtgatacactctgatattttttgttctgtcctatgtacattttttttttttttaaacctggtcacagccattaaaactgatttcacaacatacagtctgaaacacactggtctggatttttagaatctgcaaaatttcaactaccactgaacaggataatgttcaagtgaaagttttcaatgaaatagaaaacacagagcttagagtttattaggattccactttgtctttgttctctattagttatatattgttagatttacctatgctcaatctggtttc

SEQ ID NO: 4252 - DNA, 661 bp, Homo sapiens
  misc_feature [331]..[331]: Chromosome 11, SNP identification no. = rs11212514
  misc_feature [331]..[331]: allele = t, in linkage disequilibrium with rs11212570, respectively
  misc_feature [331]..[331]: n is a, t, c or g
tctcctgtgttcactgaacacacacactctgtaacatgcttataccatgatgcacgtttactaactgctgggttacttctggcttacttttttttttttttttaattttttcttttgcatgcttctctattctgggctggcctacatttttgaagtggattacctaaatgtacagagtggttaagccgtggtcagtaagattatgtttgcttttggcatttttgaaccattgagctaacctcaagttttctcttaattgagcttataattcagtgcctgagccccaagaccccagaaggtttgaatggagtatttctctttagcctgtggntgagtgatcactctaaatctaaaacataaaagcagggcaaagacttttatcatttttaaattcctcacactttctagtacaattctacacttaattatggacccactatttatgaaattgagttgataggtttgggaatcattgttgaatagaccacatcatcttctaaagtagaggaacatataatgagtctgaaggcattctctgggcaagtaggactaatgtcttacacttaagaacttaagaacttcctagcctggtgtggtggctcacacctgtgatccctgcacttcggaggccgaagtgggagactcacttgagccgaggagt

SEQ ID NO: 4253 - DNA, 661 bp, Homo sapiens
  NPAT
  misc_feature [331]..[331]: Chromosome 11, SNP identification no. = rs4144901
  misc_feature [331]..[331]: allele = a, in linkage disequilibrium with rs11212570, respectively
  misc_feature [331]..[331]: n is a, t, c or g
ttcattttctgtatgatttaactcaacagatgctgaatcattagatggttgtttagtagaagacagcgaatctccaagatgaatttctacttgtccagatacatttaaatgtgaactttcaacagacacaggtagtatttcactttgaagacaagaattatcttggcaatttgatagctgtgacataactggttctaacacattaatttctattttactcttgtgaacttcactagaatctgatgacttggaaccatgaaaattaattttaagttttactgtatcattagaattttcacaaaattgactttttttagatggctttccagtnaatgaagtatcttgggataaaagttgagaactcttcccagagagaattaagttttcattgttagcttcacaaccaagtgaaacaaatgaagttattggtatatcaggctgatcaggctgtaactgagattcactcggtacatttgaagacaaagagttcttttcaatccctatagccatttcagtttcagtggacatctgattggtgtataattcagcacaatgtggattacattcagcattagaattccctctttggttaaagtcattcaaattaggcacggactcaaaggtaatgtcaatgtcacacttctgttcagtgggtacagct

SEQ ID NO: 4254 - DNA, 661 bp, Homo sapiens
  ATM
  misc_feature [331]..[331]: Chromosome 11, SNP identification no. = rs11212570
  misc_feature [331]..[331]: allele = a, g
  misc_feature [331]..[331]: n is a, t, c or g
acagctatatctgcgcaacattgtaccaaaatttaaaataattatttgttctttaaaagtgaccaaaaatcttgccaggcaagcaacatattcttattgtagtatttatttttcttccatacaaatgggcttatgccacatacattcttttttctggaacactgccgggcatacaaagtagttattgaaatatctattgagtgaaaacatattctgtaacttatttccattttatgacacatcttaatcattttccatgtcactgtacttattttataagctatctgctgttatactttatttatttagcagtgcatggtattctattgtntggtgatagtgaatagtatatatgtatatgaaagcttatctgctcttttttttttttttttttttttgagacaaagtcttgctctgttgcccgggctggagttcagtggcacaatctcggctcactgcagcccccacctcctaggttcaagagattctcctgcctcagcctcccaagaagctgggattacagatgtgtgccaccacaaccggctaatttttgtatttttagtagagaccaggtttcaccatgttggccaggctggtctagaattcctgacctcaaatgatctgtccaccttggcctcccaaagtgcttggattacaggtg

SEQ ID NO: 4255 - DNA, 661 bp, Homo sapiens
  misc_feature [331]..[331]: Chromosome 11, SNP identification no. = rs11213801
  misc_feature [331]..[331]: allele = c, in linkage disequilibrium with rs3802842, respectively
  misc_feature [331]..[331]: n is a, t, c or g
gatgattttgctttttctttctttttctttgtttgaactatctctttattcccttacgtaaagtcacaaaaacctgcttaaaaacattaaataatttaaaagcagtaacaggtacctcagagaatgtcatcaaaaatagtaaaaataagaaggtgctttaagtgccataagtgtatttgatatttaataactaaaacagtttaaaaatcacctgtattttaaatgacaaattgatttcagaatacgtgtttgatttgatagagaaaacgtttaattttgaaaaacaatcttaaggtaacatcaccattaagtctactatagactaaattcntcgtcattaaagtaaatgagaaggagatgacatgactgagacaatttgttgcatggacacaaacacagtcctacagtgcaaaaaaacatctttttccaaattctacaggatgagtcgattcctattaaatttgcttgtgctttctttccggaagcacacgtctttgttttctcaacaactgatctgaatgcaagtttgtatctagagtatttgaataaaaactcttaagctctcctggtgtatgcaggtgtggattctttaaatagacacaatgcacaggggaaaaaaatgttttggagtaggaatcctggtaaaatttttaaactctaa

SEQ ID NO: 4256 - DNA, 661 bp, Homo sapiens
  misc_feature [331]..[331]: Chromosome 11, SNP identification no. = rs10891239
  misc_feature [331]..[331]: allele = t, in linkage disequilibrium with rs3802842, respectively
  misc_feature [331]..[331]: n is a, t, c or g
accttcgttttcctcaacttctctaaggcgtttcatttatttcataagcatttattgagcaactactaaataccagatacttgacaacactgattgttcctttttctctctaaccctctttctttcattttcctgatgctactactctggtatattcctacatttctggcctctcctccgtgcacccctaccgcttgaagtccttctccagcccctctcttcccctgcgcatcagaatggtagcatttcccaagacttcaggcttgaatttctactcttctcttgctacaaagtcttccttggagaactttactttcttagcttcaattancataattctaaagatgcttcttagatgtacagtttttaccaggtccaggttctcatatctccagaatatttttattttttattttatcatgtcaccacaacctcaaagccaacatattaaaaactgcattcttcttccccatcaaaaccgactctttccccgaccttcttgacttctcttattaatcatagtgctgttttgggggggttggggggtgtgtgtgtcttttcccttgaaaggtctcttaaatatgtcctttccttgtcatttccagtatttctggctagcctctgttttaccatttcccatcctctcagtttcctcatcccc

SEQ ID NO: 4257 - DNA, 661 bp, Homo sapiens
  MGC50104
  misc_feature [331]..[331]: Chromosome 11, SNP identification no. = rs2001754
  misc_feature [331]..[331]: allele = g, in linkage disequilibrium with rs3802842, respectively
  misc_feature [331]..[331]: n is a, t, c or g
aaaacgtttccccaaggttctaaaattgacagcattgcttctagggatagtgagaaccttattactgaggatggtgaagaaataataagagaaccttttgtttggcctattctagaaagcatttatacactgtattagtggttccactagaggaattctaagatgttttctaactataattattataattgttgttctgtagtaggttagacaacttccatttaattaaaattaaatacatgatagttgaggtgttgctggcttaccagcaaattcagctggtacagaattcagcatcagtgtgtatggcagaatataaaaacaaatgtangtatgaggcacataaccaaaattattctctaatctggttgaatttgtagatagtccagaatatatttgatttgtgagtcaaattggattgtaaaaagaatgaaaggaaggaagaaaggaagaaattaaagctacaaccagaggtagtatggtgcattggagaaaagaggttgctggtaatcacagttacacattagtcactggcttggaacaataataatctctcagttccattttcctcatgtgtaaaatgggtataatcacctcttcttagctgtcttcagaggattagaaggcaaaaataggatatacatgtgaaaattccttgaaa

SEQ ID NO: 4258 - DNA, 661 bp, Homo sapiens
  MGC50104
  misc_feature [331]..[331]: Chromosome 11, SNP identification no. = rs7116087
  misc_feature [331]..[331]: allele = c, in linkage disequilibrium with rs3802842, respectively
  misc_feature [331]..[331]: n is a, t, c or g
tgctctacatatagagaccaaaagtgaactatttccacacagcgtgattcttgcatgccaatctcaagtgtttgcttttcaaatcagtattacttacagttattttctttctgtacattatcctaaattcttacatttaaattatttcactgctaaaatctctacatcaagggcatacaggataaggcaatattgtcagctgggtttcttggttaataatctttcctaattattttggagggttaatattacaagcaacggatagaagtatgacaatagtacgtatttgatgggaaattttgggggaacagaaggtgaataggcaccattnggtgtgtttatgacatagagcaattgccataaagttgggcagactttaactgtagaacagatgtgcattgtctatcttagtccctaaaaccgcctgtccttccagcaagactgctagttggacgtttgtttagttacacattcagctgctgctttgctataccaattgtgcacaattcagttaccacaagtgtaaacatcatgacatctagatctgtgatttgcatttggatttcttgtgaagtattaagaggaaaaaatacatgcaattggaagctgcatattctatcatctcaaagtttctttgatttccatgaaactttgggtaaca

SEQ ID NO: 4259 - DNA, 661 bp, Homo sapiens
  MGC50104
  misc_feature [331]..[331]: Chromosome 11, SNP identification no. = rs11213809
  misc_feature [331]..[331]: allele = a, in linkage disequilibrium with rs3802842, respectively
  misc_feature [331]..[331]: n is a, t, c or g
gacagagaaagaaagaaagaagaagaagagaaagaaagaaagagaaagaaaggaaggagggagggaagagacaggaaggaaggaaggagatgaaggaaggaagggagggaagggaaagagacaaagaaagggaaagaaagaaagagaggaaggaaggaaggaaaagaaaagagacagaaggaaggaaggaaggaaaagaaaagagaaggaaggaaggaaaagaaagagaaagaaagaagaaagaaagagggagggagggagggagaggaaggaaggaaggaagaaaggaagggagggaaggaaagagaaaaagacttcttggaggaaagcntgccacgagctaagctttgaaggaagaagatgacccaggtgagcagtgagcaggagtagaatccaagcagaacacacgaaaggggcaaaggcacaggggaaaggaagcaattccctgtgacgtgcagcggatgaaccaattttgtctgcagcatagagaagtgaaagagaaggttgggaggcctgcacaatccttcaaaattcagttctcatcttgcctgttaaggtctcccagacactcccctctgctcccaaagcctccggaatatttttctgctaaaatattcttacattgcactgtcacttcttgttttcttaaatctgtccctca

SEQ ID NO: 4260 - DNA, 661 bp, Homo sapiens
  MGC50104
  misc_feature [331]..[331]: Chromosome 11, SNP identification no. = rs4548657
  misc_feature [331]..[331]: allele = c, in linkage disequilibrium with rs3802842, respectively
  misc_feature [331]..[331]: n is a, t, c or g
aatatatcttatttatccttgctactttttcatgaatgccagcagaagaatctatttctcatttgaaattttgcaaggttattgataaagggaatcagtattcaccctgggaacatctccctataccttttgctccatctcatagcacagtgctttgcatattgcttgttaacacggccagctaaccccctccacgagcctacaaagaatttaaaaagaaaaaaaaaatcttccgaggaggcagtgtctagtaaactcaaaacaccaatgtttgaatacagaggtacacactatattcttggcattcatttgaatgaatgctttactaagnctttctaaatggcctattgtctgactttaattagcccactgtcctgccctgtttagagatctgaaccacattcccagtgctttctgtgttccccacccaaccacctgctccctcacaatcacagaaatttttaaaataataataaaggcaaaccttttgcaagcaacttattttttcagctgctctattggttctgcagggtttttttaatgtcataaaatttaaaataattcctggtggtgaattctttcatgcagcttgcaaaaataatcagtttttgcagcggaacagccgtggcaagtccatctggcagggatgtagttctgcaga

SEQ ID NO: 4261 - DNA, 661 bp, Homo sapiens
  MGC50104
  misc_feature [331]..[331]: Chromosome 11, SNP identification no. = rs1987128
  misc_feature [331]..[331]: allele = c, in linkage disequilibrium with rs3802842, respectively
  misc_feature [331]..[331]: n is a, t, c or g
tagaaggcaggagatgccaccaaatttcaatggcactatatatgattgggaaacaacatacagacatttaaatattcgggatcctcgattgctcttattcctttcccttatccagctctgaaggtgataaaactattagggaatgtgccgcgtctgagttgaactaaatgagattgtctttgcctgtgtggtgtgtgtttatacaagaatgtccaacagtattattaggaattccccttttacatccccacaggagtatttaatgagacataggcattgaaatgaattcaaaatactgaaccaaatgcctgactccctctgctcgcagacngctttcccctttctgtttgaaagcagatgcctcatctatcagatcatggtgtcagaactttagacaatttaaaactgtatcaagggcataatttatattgcctttgccccaaaagcttgggataaaagggctgctttcaagacaaaatgaattttaaattcagaaattactgcatgagttctgtccttcgctgattttgtattttagacaaaactattttaaaggagcagagttttggaagtgttgtaaggtcgttatgaaagaatggaagcccagatgcttgatttaaattcaaaagggaataattgcttattgaattaaagtactcac

SEQ ID NO: 4262 - DNA, 661 bp, Homo sapiens
  MGC50104
  misc_feature [331]..[331]: Chromosome 11, SNP identification no. = rs7130173
  misc_feature [331]..[331]: allele = a, in linkage disequilibrium with rs3802842, respectively
  misc_feature [331]..[331]: n is a, t, c or g
agtttctgtccctccctctctccaccaaggaaaactttttactttttttttttttttttttgagacggactcttgctctgggcgagatctcagctcactgcaacctccacctcccgggttcaagtaattctcctgcctcagcctcctgagtaactgggactacagcagctgtgattacaggcatggtggcccagctgatttttgtattgtttttagtagagatgggttttcaccatgttggccaggatggtctcaatctcttgacctcgtgatccgccagcctgggcctcccaaagtgctgggattacaggtgtgagccaccgagcctgcnccaccaagggaaactttatgtagccggcactgtcttcctaaacgtgctgggccctggtgagttgagtgaaggagtccatgaggccacaagagggcagcaaataacataaaactcatcaaaaccctaaaactacaggcctctaaaattggcttctgtgtggccatctaatcctaaagaaagtcatttattgatgtctgccaggcgtgcgacccagtgtaaggtcaatgtgtgaagaattagaaggcagagtacagcctgcctctttgaggtggggttatatgtgttaccttatccagacatagcgatctcagataacaggccaggagcacc

SEQ ID NO: 4263 - DNA, 661 bp, Homo sapiens
  MGC50104
  misc_feature [331]..[331]: Chromosome 11, SNP identification no. = rs3087967
  misc_feature [331]..[331]: allele = t, in linkage disequilibrium with rs3802842, respectively
  misc_feature [331]..[331]: n is a, t, c or g
aaaactaagaaacatctgacaggaaaatcagtatcttttatgatctgcataaactttttaatgtaatttaagaaaaatcagtgccaaaaatgatacttcaaagataacagaagattcagaacgtaatgggttacaacagttccaaaaagaccacattgtaaggttatcttactagaatacggtctctgacacatttaattaacattctgttttatttcagtggggttacagtggagaggattacaaataaatgccctcgtccactaacaaagagcagcattgaggcttattctgaaaatccagtcctgaatgggctgacacacctaaaacnatctttggaatacacctcaagttaaagaaaaacccagaagtcatttggccctcccctcaataagctctgcggcattcatatgacccccaggcaatactcccatcttctttcacccaaggggaagggtcatggagggaaccggtgtctgcttcctcatctggggagagtggccccaccttgggcggtaggtcatttgacaccgtcatgaaaggggtgaaggggtaaggaggcggggtagggtaccccggagtgtggtgcagatcttccagagcatgcagcgagtatgactgagccccagccagggatgacccccagcttgagcccctgtgc

SEQ ID NO: 4264 - DNA, 661 bp, Homo sapiens
  misc_feature [331]..[331]: Chromosome 11, SNP identification no. = rs4477469
  misc_feature [331]..[331]: allele = c, in linkage disequilibrium with rs3802842, respectively
  misc_feature [331]..[331]: n is a, t, c or g
cccgtctctactaaaaaatacaaaaaattagctgggcatggtggcaggcgcctgtagtcccagctacttgggaggctgaggcaggagaattgcttgaacctgggaggcggaggttgcagtgaccgagatcgcgccactgcactccagcctagcgacagagcgaaactctgtctcaaaaaacaaaaagaattctgtttagtttgacaatgtgtctctgttttacatatattttaatttgattctgttttattgttcagggaatactttgttaaaaggtgaaatcaaactacaaaattatgacaggaaaattaattctatttccttatccaancccatttttctttcaattcctctctgttttctttcctttctttttttttttttttgagacagtcacccaggctggaggagggtggagggcagtgacacaatctcggctcactgcaacctccgcctcccaggtccgagcaattctccttcttcagccacctgaatagctgggattataggcatgcaccaccacacccagctaatttttgtatttttagtagagatggggtttcaccatgttggccaggctggtctggaactcctggcctcaagtgacccacctatgttggtctcccaaagtgctgggattacaggcgtgagccaccgcgcc

SEQ ID NO: 4265 - DNA, 661 bp, Homo sapiens
  misc_feature [331]..[331]: Chromosome 11, SNP identification no. = rs10789822
  misc_feature [331]..[331]: allele = a, in linkage disequilibrium with rs3802842, respectively
  misc_feature [331]..[331]: n is a, t, c or g
atgaaataaaattactgaacctttgaaatagcacagaaaaatgttgatatattcatttagtatgtacatgtactatgatctgttgctaagaaatcttataaataaaagttatttaatgtttgatcattatctctggtgtgactaaaacaagtatgataaatcaggaacaagaatccccaaaggtcaagctaaataaacattaaaatattctatagttatttgcaaatgatggcattatattatatttgatttttgatatggaagtatcctctgaccaggtgtggcagttcacgccgcctgtaatcccagcactttgggaggccgaagcggnaggattgctcaagcccaggaggtcaaggctgcagtgaaccatcattgcaccactgcactccagcctgggagacagaatgagaccctgtctcaaaaaagaaaaaaaaagtatcctctaattataatctctgataaataacatacgtgcatttgtaatatgcaatgtcattgttagtacaattaaaaaaaagaacagtaaaaaatgttagaagttccaagaggaatgaaatgtggaccaaacatacagtatctaggaattagctcttttggattaggaaaattgatagatatacctgctaaacttccccctaagaaaatatcttaacaggaa

SEQ ID NO: 4266 - DNA, 661 bp, Homo sapiens
  FLJ45803
  misc_feature [331]..[331]: Chromosome 11, SNP identification no. = rs6589218
  misc_feature [331]..[331]: allele = a, in linkage disequilibrium with rs3802842, respectively
  misc_feature [331]..[331]: n is a, t, c or g
tagaaaggagaggttaggaaggagatgaagcctgaaagcactgggaggacaccccagcataggggaacacagagacacgtgaagccagggagaaaaccagtagtacagataagaaatggaagaaagcaatgacaggaagagagacaaagaaacacagaaagaaataaacaaaaatgcaacaaagaaggtttttaaaagcaaatcaaaaaataagagtataacaaaaaggaggagagcagcgaagaaaagaagtaatggaagacgctatgaggacaagagaccatccctagattccaagctgcttggttcactgttccttcagagggggcanggcctaggcacagcgaggaagaaggcatgcagggaggggaggtgccatctccacccccattgtccttcccctcctcaggtctggtccatcagggaaacctaggacacaggctcaggggcatttgtagaaagaagttccagaagctgtcagatttcaatacatccatcctgccctccactgccaggtgccacctcaggtgttcccaggcctgctcctctcccccagagatgtggcttcagctgccaagcaattcctatcagtcttgtcattctcagttgccctttccctaagctctgtgtgtttccctctgtatttgacacatttgggggc

SEQ ID NO: 4267 - DNA, 661 bp, Homo sapiens
  LOC120376
  misc_feature [331]..[331]: Chromosome 11, SNP identification no. = rs3802840
  misc_feature [331]..[331]: allele = t, in linkage disequilibrium with rs3802842, respectively
  misc_feature [331]..[331]: n is a, t, c or g
acgggcacaccaggcggcctccgggggaaccgtaagcataagcccttccctcattccccagcccatgccaggcctctttcaaagctgtgtctgcaaggtgtggaggccactcaaggccccacgcactcaccattcccagacctggccttcctctgctgttcctatgacttctgtacccagctgcatcccaatcgggaagctacagaggacagctggggcatgttgtggggctcaggatttgggggagcccatccatcccccatgggtgaaagtaaagtataaaaagtgcgttggtcctctgcagggggaggagcggccagcaggtaagtanacatcgttttgttaggaagacagtggatatatgtacagcccttgcagacccatagaaaatctctcccagaaattcacctcattttaggggccccttccaggatagcatctgtgtggaacatcctcccttccctcctcattcttctggaactcaccctctgagatcatttatctgtaaatcatcagttacctaaagtatctagcagaaaagggccctgtctctgcagaagagacagctggagtacaggaccacttccctaaaatgtatcaacaccttaagcagtttcaggttattacaaaattgaactgagcagtcataagggtataccct

SEQ ID NO: 4268 - DNA, 661 bp, Homo sapiens
  LOC120376
  misc_feature [331]..[331]: Chromosome 11, SNP identification no. = rs3802842
  misc_feature [331]..[331]: allele = a, c
  misc_feature [331]..[331]: n is a, t, c or g
catgccaggcctctttcaaagctgtgtctgcaaggtgtggaggccactcaaggccccacgcactcaccattcccagacctggccttcctctgctgttcctatgacttctgtacccagctgcatcccaatcgggaagctacagaggacagctggggcatgttgtggggctcaggatttgggggagcccatccatcccccatgggtgaaagtaaagtataaaaagtgcgttggtcctctgcagggggaggagcggccagcaggtaagtatacatcgttttgttaggaagacagtggatatatgtacagcccttgcagacccatagaaaatctntcccagaaattcacctcattttaggggccccttccaggatagcatctgtgtggaacatcctcccttccctcctcattcttctggaactcaccctctgagatcatttatctgtaaatcatcagttacctaaagtatctagcagaaaagggccctgtctctgcagaagagacagctggagtacaggaccacttccctaaaatgtatcaacaccttaagcagtttcaggttattacaaaattgaactgagcagtcataagggtataccctgacactttatacaccttcctacggtaagtactgccaaaggcactcagggcagcaacagaacca

SEQ ID NO: 4269 - DNA, 661 bp, Homo sapiens
  LOC120376
  misc_feature [331]..[331]: Chromosome 11, SNP identification no. = rs4608113
  misc_feature [331]..[331]: allele = t, in linkage disequilibrium with rs3802842, respectively
  misc_feature [331]..[331]: n is a, t, c or g
cagaaaagggccctgtctctgcagaagagacagctggagtacaggaccacttccctaaaatgtatcaacaccttaagcagtttcaggttattacaaaattgaactgagcagtcataagggtataccctgacactttatacaccttcctacggtaagtactgccaaaggcactcagggcagcaacagaaccaaataaactaggtggggttattgcccaagagagggcagctcatccctaaaaagcctcaatcatacaattgcttgggggttggtttgggtgtgaacataggatctgacagctggggctcatattgcctctgttaggattggnccttctccagcccattggcatctgccccacaacagtttttgtgcctgatgctgttcatgtgcaatgtgtgacttcatgaaataggcctttgacagcgggacttcttgaaatgggagggggcaaatgatgtaggggaggtaaacacaggttccagaaccagatggactgggctcagatctcagttcctccatggtgtgtatcctcaagcaaattacccaattcctcttgcctctgtttattcgtcttcaaattggggatgataggattttgtgagggttaatcgagttattgcatacaaagccgttagaagaatgctttccacatagtgag

SEQ ID NO: 4270 - DNA, 661 bp, Homo sapiens
  LOC120376
  misc_feature [331]..[331]: Chromosome 11, SNP identification no. = rs6589220
  misc_feature [331]..[331]: allele = c, in linkage disequilibrium with rs3802842, respectively
  misc_feature [331]..[331]: n is a, t, c or g
ctctttatgctctaaattcatcattctgcagatctgacgatactaagcaggagtctgatagcctcaaccccttcagttcagagatggttatataattaacaaaaccaggtacaagggaactggaaaatgcttctggagaaaaacatcatcaagactttcataataaaatgtaacgtttccttaaggagctttggtacttgctacagttctgctcagctgcacctggagagccccatgtgagtgtggcacttctgttgctgctgggcccttacagatgggtgtggccactgttcccttcttagctcgctacaggagctaatgtgagggtaanacacttcacttgtgtatctgaccagtttctgttccccggagtagtttgacttatttaaatttttctgaattccctcctgagaaataaagcaggacttctgaaccagtgtcttataggaacaggcagagtaaagcctgctctactttgcttcccttaagactgcatcagcctatgccctcgcaagcaagcaggtttaacacgcatataatttaattacaaaagccagacgtaaaatccctcactggaagccatcggatggatctgggattctaaagaagctgtgagagcgtacttagtaggcaagggtagcagacaccaggggatgatgtt

SEQ ID NO: 4271 - DNA, 661 bp, Homo sapiens
  misc_feature [331]..[331]: Chromosome 11, SNP identification no. = rs11213825
  misc_feature [331]..[331]: allele = a, in linkage disequilibrium with rs3802842, respectively
  misc_feature [331]..[331]: n is a, t, c or g
ttctcttatctaacattagtcaatgaagtgttaggacgaccaaaaagctcatgttgcctgcagctatgttagcctgtagatcattctttttcctttccaaagcattgctttggaaactttctgagcaaatagttgatcttttccttgagagctgccatacagttaatgcagcccaaagtttagaagtcattattttctatttctgaatttttggctttaggttcttaaatatacatcacttttgtttacacgttgatttatagtattgactatgttgtttacacttgaattttagagtttgcttcctctgattaatctatttgaagaagcncagctgtctttcaaggtaaagaggagttatttaatctacctatgtgggactagactgttgaatcttgtttgctgaaggcattaaggcacaggacttaatctctgaagtgaagtctgaagagcctttgccacatctcaagtgccagtacaatggcagcaatactggtaccttcagcattggccacaggtaccattttctgagcacgtcctatgtgccagaattatgtaagagtattctcactcgttatctgatttaatcttcacaatactgacagcaaaatgaggagtctgaggctctgggaagttagttcacctgtccagtgtcacccag

SEQ ID NO: 4272 - DNA, 661 bp, Homo sapiens
  misc_feature [331]..[331]: Chromosome 11, SNP identification no. = rs7933961
  misc_feature [331]..[331]: allele = a, in linkage disequilibrium with rs3802842, respectively
  misc_feature [331]..[331]: n is a, t, c or g
ttgtttacacgttgatttatagtattgactatgttgtttacacttgaattttagagtttgcttcctctgattaatctatttgaagaagcccagctgtctttcaaggtaaagaggagttatttaatctacctatgtgggactagactgttgaatcttgtttgctgaaggcattaaggcacaggacttaatctctgaagtgaagtctgaagagcctttgccacatctcaagtgccagtacaatggcagcaatactggtaccttcagcattggccacaggtaccattttctgagcacgtcctatgtgccagaattatgtaagagtattctcacncgttatctgatttaatcttcacaatactgacagcaaaatgaggagtctgaggctctgggaagttagttcacctgtccagtgtcacccagcctgtaggcacccaagcttgggtcagaaagatagcaaagccctgttccttcctctccagggctgggaagtttgagccaccattcgtgaaagaccattcaggaacccatggcatcattaaatgccaacttcctcatatacacaaaggtgtgtcccaaaaacaattcagtcagacctcgccaaaagggccggattgtccataggacacagagatgccaggcacaagagctaccagattatagg

SEQ ID NO: 4273 - DNA, 661 bp, Homo sapiens
  misc_feature [331]..[331]: Chromosome 11, SNP identification no. = rs586370
  misc_feature [331]..[331]: allele = a, in linkage disequilibrium with rs1790191, respectively
  misc_feature [331]..[331]: n is a, t, c or g
acagctctttgaagaagcttgcctaggaaaggaaagagacggataacttgaggggaaattggaatacaggaaaggcttatctttttaaaaatatatatattttataactcttttccagattttattttcattgattttctctattgatttcctgggttttgttctgttttttagagatgggagtctcactatgttgcccaggctggactcaaactcctaggctcaagtgatcctcctgccctagccgtccaaatgtctgggactactggcacaccactgcgtgttttatttttaaagttaaagatgcaggagagagatgagtaaaattcantgagagacttctgaaagaggaagaaattggggttcaggttagcctttggccaaaacggtgacatttccaagcagagagaagaatgggggcaatgatgcagaaaaatgctatgctttttggggggctggggtggaaaagtcaggaagatgggagaaataaaggagctcccttctggaggcctctgctttctctgagaaataggaagctcagtagggagaagggtttggaggccagagaggagcaagagcttgaaatagttgttgttaggaggggatgcagctacaaatagccttgaggaaggctgtatttgatggtgatggcccagctgag

SEQ ID NO: 4274 - DNA, 661 bp, Homo sapiens
  misc_feature [331]..[331]: Chromosome 11, SNP identification no. = rs663003
  misc_feature [331]..[331]: allele = t, in linkage disequilibrium with rs1790191, respectively
  misc_feature [331]..[331]: n is a, t, c or g
aggtggacttcaatgttctcacatttaaaatggaagacttggccaggtgcggtggctcacgcctgtaatcccagcagtttgggaggccgaggcgggtggattacctgaggtcaggagtttgagaccagcctggccaacatggtgaaaccctgtctctactaaaaatacaaaaatcagccgggtgtggtgatgcatgcctgtaatcccagctacttgggaggctgaggcaggagaatcgcttgaatccaggaggtggaacttgcagtgagctgaaatcatgccactgcactccagcctaggcaacagagtgagactccatctcaataaaatnaaataaaaaatggcagactcaccaggcacagtgacacatgcctgtcatctcagcactttgggaggctgaagtaggaggatcacttgggacctggagtttgagaccagccttgtgacgcagcaaggctccatctctacaaaactgaaaaaaaaattatggccaggcgctgtggctcacagcctgtaatcccagcactttgggaagccaaggtgggaagattgcttgagcccaggagttcaagaccagcctgggtgatatagtgacatctcttctctattaaaaaaaaaaaaaaaaaagcctgggcacggtggctcacgcctgtaatcccag

SEQ ID NO: 4275 - DNA, 661 bp, Homo sapiens
  UPK2
  misc_feature [331]..[331]: Chromosome 11, SNP identification no. = rs1790191
  misc_feature [331]..[331]: allele = a, g
  misc_feature [331]..[331]: n is a, t, c or g
tccctggtaattcatacgcatattaaatttggagatgcactggcgtaagaccctcctactctctgcttaggcccatgagttcttcctttactgtcattctccactcaccccaaactttgagcctacccttcccaccttggcggtaaggacacaacctccctcacattcctaccaggaccctaagcttccctgggactgaggaagatagaatagttcgtggagcaaacagatatacagcaacagtctctgtacagctctcaggcttctggaagttctacagcctctcccgacaaagtattccactttccacaagtaactctatgtgtctgantctcagtttccacttttctctctctctctctctctcaattttctgagacagagtttcacttagttgcccaggctggagtgcaggggcacaatctcggctcactgcaacctccacctcctgggttccagtgtttctcctgtctcagcctcccgagtagctgggattacaggcacacaccaccgcgttagtttttgtatttttggtagagatggtgtttcgccatattggccaggctgatctcgaactcctgacctcaggtgatccgcccacctcggcctcccaaagtgctgggattacaggcatgagccaccacgcccggctgatctcttt

SEQ ID NO: 4276 - DNA, 661 bp, Homo sapiens
  misc_feature [331]..[331]: Chromosome 11, SNP identification no. = rs7113731
  misc_feature [331]..[331]: allele = g, in linkage disequilibrium with rs1790191, respectively
  misc_feature [331]..[331]: n is a, t, c or g
tgctccaaccaccttggcctcccaaagtgctgggattcagttgtgagccaccgcgccaggccaaagagttttatttagagttcggacagcttggaggagtgctcagctcctagcagagaggaggccctggagagggtggctcctctctgcagacaagtcattctgatgtctctgcaggtctctgaagctctcagaagagagggtagctcctctccaccagcaggtcgtctctatggctctcagcagagagggtacaccctccgcagctggttgtcccatcgtcacctgctatcagcagaaagggtactcctttctgcagctggtcgtcaantcccattgtctctctgccctcttcatcctctggccatcctctgccctgctctggctgagcccagggcttttatggacatcagaggggagaaaagtccataggcagccgtgggcaagcccataagaggcatcacaagtccccactccggtcagtgggactggcagcccagcccccagctttcaggccctccctggcctgagggtggggacttactgagggccccaccccttcccacccaggactctgtctgcctcccactgccattcatgacccctgggcttggccccaaccccgctcctttctgagatcggagcaggtgctgggagcaga

SEQ ID NO: 4277 - DNA, 661 bp, Homo sapiens
  misc_feature [331]..[331]: Chromosome 11, SNP identification no. = rs3890562
  misc_feature [331]..[331]: allele = g, in linkage disequilibrium with rs1790191, respectively
  misc_feature [331]..[331]: n is a, t, c or g
tcccaaagtgctgggattacaggcgtgagccatcgcgcctggcccaactcaatggatccttattttgttgattaggttataattcattactgttattcttttagtcctaaaactgtcccagacttgcccagggggtgaggcatcctcctctggttccttggtgtggcatcccgggttcccctagcagagaccatccacccggtactgtgttgcttgttgcctgtgtcctagaccagaaactttgcatagtattttaggatttggtacataggagaccctcaatagatgttgatttaactaaagtgaaatcagcagtttcctctcccactcngcaaatgcttgtgattggaaacagcttattttttattttttaaaatttgctttattttgagacagtcatctcctttcttgcctaggctggtttcaaactcaaacttgagcccaagtgttagagaccagcccgagcaacatagcaagacctcatctctaataatcataataagaaaaaaagtttggctaggcatggtggctcacacctgtaatcctagcactttgggaagcaggggtgggcagatcacctgaggccaggagttcaagaccagcctggccaacatggtgaaaccccgtctctactaaaaatataaaaattaattggccggga

SEQ ID NO: 4278 - DNA, 661 bp, Homo sapiens
  FOXR1
  misc_feature [331]..[331]: Chromosome 11, SNP identification no. = rs4938602
  misc_feature [331]..[331]: allele = a, in linkage disequilibrium with rs1790191, respectively
  misc_feature [331]..[331]: n is a, t, c or g
tttttttttagagacagggtctctatctggtgcccaggctggactgcagtggcaccagcacagctcactgcagtcttgagcagccttgagcagccttgagcagccttgaactcctcggctcaagtgatcctcctgcctcagctttccaaagcaggctgagattacaagcatgagccactgcacctggtccctaaaatgggagaattaacagcatgtttgcatgctgatgagaatgacccaacaaagacaaaaaattagtgacacaggaaagagaggggaagatttgtggaacaacatccttgaaaaagcatgggggatctgtgccaaaganagacacagacatacaaaggtgctatccttgggtcgcaatgagatcaccagtccattgatcctatcaccttttcactgtttcaatcacttgatatgtccacccttatttaactaacttgaatcccatggtcagatattacgcaggttccctggatcatctgtggctttggagcactttgttggccaaaccacaaccctgactaaatccacctctgccaaacgagtgcgccaaaaccataattcagtggactggtgacctcagtgggatcatagttggggttgagggagttagccagaaagacacgaggtggtgcgtttttatgtggtgcat

SEQ ID NO: 4279 - DNA, 661 bp, Homo sapiens
  FOXR1
  misc_feature [331]..[331]: Chromosome 11, SNP identification no. = rs4938603
  misc_feature [331]..[331]: allele = g, in linkage disequilibrium with rs1790191, respectively
  misc_feature [331]..[331]: n is a, t, c or g
gggtctctatctggtgcccaggctggactgcagtggcaccagcacagctcactgcagtcttgagcagccttgagcagccttgagcagccttgaactcctcggctcaagtgatcctcctgcctcagctttccaaagcaggctgagattacaagcatgagccactgcacctggtccctaaaatgggagaattaacagcatgtttgcatgctgatgagaatgacccaacaaagacaaaaaattagtgacacaggaaagagaggggaagatttgtggaacaacatccttgaaaaagcatgggggatctgtgccaaagagagacacagacatacanaggtgctatccttgggtcgcaatgagatcaccagtccattgatcctatcaccttttcactgtttcaatcacttgatatgtccacccttatttaactaacttgaatcccatggtcagatattacgcaggttccctggatcatctgtggctttggagcactttgttggccaaaccacaaccctgactaaatccacctctgccaaacgagtgcgccaaaaccataattcagtggactggtgacctcagtgggatcatagttggggttgagggagttagccagaaagacacgaggtggtgcgtttttatgtggtgcataaatgaggttacggag

SEQ ID NO: 4280 - DNA, 661 bp, Homo sapiens
  FOXR1
  misc_feature [331]..[331]: Chromosome 11, SNP identification no. = rs4938604
  misc_feature [331]..[331]: allele = c, in linkage disequilibrium with rs1790191, respectively
  misc_feature [331]..[331]: n is a, t, c or g
aactcctcggctcaagtgatcctcctgcctcagctttccaaagcaggctgagattacaagcatgagccactgcacctggtccctaaaatgggagaattaacagcatgtttgcatgctgatgagaatgacccaacaaagacaaaaaattagtgacacaggaaagagaggggaagatttgtggaacaacatccttgaaaaagcatgggggatctgtgccaaagagagacacagacatacaaaggtgctatccttgggtcgcaatgagatcaccagtccattgatcctatcaccttttcactgtttcaatcacttgatatgtccacccttattnaactaacttgaatcccatggtcagatattacgcaggttccctggatcatctgtggctttggagcactttgttggccaaaccacaaccctgactaaatccacctctgccaaacgagtgcgccaaaaccataattcagtggactggtgacctcagtgggatcatagttggggttgagggagttagccagaaagacacgaggtggtgcgtttttatgtggtgcataaatgaggttacggagaggttgcagttgttggtttaggttatgcctgagggagtgtccacagtagagtagaagtcaaactcgctggagaagagttcaataaatagcaa

SEQ ID NO: 4281 - DNA, 661 bp, Homo sapiens
  FOXR1
  misc_feature [331]..[331]: Chromosome 11, SNP identification no. = rs4938606
  misc_feature [331]..[331]: allele = g, in linkage disequilibrium with rs1790191, respectively
  misc_feature [331]..[331]: n is a, t, c or g
aaagagtacttctactttccctggagcagtgcagggaggcttcagagaagaggcagcatttgagccttgagtgaaagaagcagatgacctgctatgagagagcatcccaggcctaggaaacagcaattgtgaagtataaactcctgaactctctccttttcttacagatgtgatgcccttcctctttgatctttaaccccaagaagcaacagccagctaatgctttattaaaattaccctcactagccttctgtgtgtgtctgtggaggtggggtctctaaggatggggttaagggtggaggtggagatcaactccaaggttggagatggnatgccttcagcttacagatgctcctgaggcaatggggcaggtgcctgccgtgcagcaaagggagtccgtaattttctttcctcaaaggaggaaaatgcacagccttctaaagcatcttggagcaatttccatttttctggattatgaagataatcttggctggatgcagtggctcacacctgtaatccagcactttgggaggctgaggcaggaggatcccttgagcacaggaggtcaaggctgcagtcggccatgatcacaccactgcactttagcctgggcaacagcaagactccatctgtaaaaattattctgggagatgcccgtttg

SEQ ID NO: 4282 - DNA, 661 bp, Homo sapiens
  FOXR1
  misc_feature [331]..[331]: Chromosome 11, SNP identification no. = rs4936451
  misc_feature [331]..[331]: allele = t, in linkage disequilibrium with rs1790191, respectively
  misc_feature [331]..[331]: n is a, t, c or g
catttgagccttgagtgaaagaagcagatgacctgctatgagagagcatcccaggcctaggaaacagcaattgtgaagtataaactcctgaactctctccttttcttacagatgtgatgcccttcctctttgatctttaaccccaagaagcaacagccagctaatgctttattaaaattaccctcactagccttctgtgtgtgtctgtggaggtggggtctctaaggatggggttaagggtggaggtggagatcaactccaaggttggagatggaatgccttcagcttacagatgctcctgaggcaatggggcaggtgcctgccgtgcagnaaagggagtccgtaattttctttcctcaaaggaggaaaatgcacagccttctaaagcatcttggagcaatttccatttttctggattatgaagataatcttggctggatgcagtggctcacacctgtaatccagcactttgggaggctgaggcaggaggatcccttgagcacaggaggtcaaggctgcagtcggccatgatcacaccactgcactttagcctgggcaacagcaagactccatctgtaaaaattattctgggagatgcccgtttgtagcagccaattctgtaagcaccacacattcattcaattgatactccttaagtggc

SEQ ID NO: 4283 - DNA, 661 bp, Homo sapiens
  misc_feature [331]..[331]: Chromosome 11, SNP identification no. = rs3889526
  misc_feature [331]..[331]: allele = a, in linkage disequilibrium with rs1790191, respectively
  misc_feature [331]..[331]: n is a, t, c or g
actgttggaggccgaggcgagtggattgccagagctcaggagtttgagaccagcctgggccacatgatgaaacttcgtctttagtaaaatacaaaaattagccagatacggtggtgcacgcctgcagtcccagctgcttgggaggctgaggcaggagaatcgcttgaacctgggaggcggaagttgcaatgggatgagattgctccattgcactccagcctgggcaacagggtgagactccatctcaaaaaacaaaaacaaagcaaaaaaatccctgatgttaacaagaatgtgcacagcgataaggctgtatacgaagtgcagatgatgnggacaaattgaggccaaatcagatgaaagcagagcttgggactcaggacccctccttcctgggagctgaatagactcgggtggcaggaaagaggctctggctgccggatagctctgggtgggcccagagcaaatgacctgacctggtccccctcacccactcctgcagtggctatcacttagaaatcagcatccaggctgggtgcggtggccacgcctgcaatcccagcgctttaggaggccgaggcaggtggatcacctgaggtcaggagtttgagaccagcctgaacaatacggtgaaaccccatctctactaaaaatacaaaaaatt

SEQ ID NO: 4284 - DNA, 661 bp, Homo sapiens
  misc_feature [331]..[331]: Chromosome 11, SNP identification no. = rs4938736
  misc_feature [331]..[331]: allele = a, in linkage disequilibrium with rs518932, respectively
  misc_feature [331]..[331]: n is a, t, c or g
gtgggctgccacctgcacctgcgagtcaccatccctggccttcacttcttgcctccacggtcaccactgtttgccctgctggccactggcttctctttcaccccagatacccagaggcctggaaacacaatctgggcagtacaggaaatgcaactgccctccctgtctctagggccggaccagctccagacggcctcctgcctgggctgcatctgtctgcacagggtgcaccaaagagaggatcaccccctcctctccagagttttgaaagctaggattcaggatcaggatctgtaagcccctaaaattacatgacaacttggtgtctatntgtatctgcactttttctggaaagaggttttcatagccttcagattctcaaagtcctttagaacaaaaaaaggtggtccatgcctacaagggtggtgacaagagccgagtgggtgtgggggctgagcttgctgaaatagtaaataggagtttggaagtttattttattgccttaagcccggaattacattttctttgcatgtggatgagtctgcttttctggtttgccaaataggttgaccattgatgtccaggtgaacacacagagttagcccagcccagaccacggcataaacccagggtgtaattcagccccagaacaacccccagg

SEQ ID NO: 4285 - DNA, 661 bp, Homo sapiens
  misc_feature [331]..[331]: Chromosome 11, SNP identification no. = rs2044545
  misc_feature [331]..[331]: allele = t, in linkage disequilibrium with rs518932, respectively
  misc_feature [331]..[331]: n is a, t, c or g
gagtctcactttgtcatccaggcaggagtgcagcagtggcacgatctcagctcactacaacctccacttcctaggttcacgtgattctcctgcctcagcctcctatggagctgtgattacaggtgcccaccaccacacctggctaagttctatattttgagtagagatggggatttcaccatgttggccgggctggtctcaaactcctgacctcaagtgattcacccacctcggcctcccaaagtgctgggattacaggcataagccactgcacctagtctcacatttctactcaaagcagtcgtaaggttcagtgaatcaatgtgagggntttgtctctcagcttgatctacaagtttttgacaaaccagaggtgagcggaaaggagaaagaagctgaggtgagcaggcaggtgtgggtagggatggccaagaggaccatgaagccaagccggttatttgtctccaggtgagcctggggagcccagagctcattagaagcccttgatcagctagcagtggacgcagcctggttagacaactaggccctctctaacggggcctccagggggctgcaccaccctgagtggagggtatcctctggtcacgggtactccgtctcgtcctatgtggcagtctgcagagtgtcagcactggtcctt

SEQ ID NO: 4286 - DNA, 661 bp, Homo sapiens
  misc_feature [331]..[331]: Chromosome 11, SNP identification no. = rs4938737
  misc_feature [331]..[331]: allele = t, in linkage disequilibrium with rs518932, respectively
  misc_feature [331]..[331]: n is a, t, c or g
ggcataaaaagaagtgttggtcccaatgcctgtgtgtagggcctgaaagaaatagaataaacttaaggaaatttacactgtggccccttgaaatttgtaatctatgttacacgtgttttcaacttcccagttgagctctttttatggattcttttctgtaagtgtacacaacaacataaagcctttaggccaaatctgtctcacttgaccttaagctgcccacttgacatttttaatgaaacattttgttttacttaatgatttcatgtacttagtctagtaagaccttatcccctaccagtaaagagcttgccaagctttgtggataggngaaaatcaacattctttctctgatggtatacctgcaggaaaagagagacaaaggaagttttaacagtttattcgaatttaaaaagtatgcatcatctgaagagtctgggttgcaaacttcgcaagacaggttgatcgcatgatgtaagggggacattctctgatggtttatttccttcgtccttgtgcccatcccattgctgggtggtgaacacttgtcaaagaaactcattcaaatgctttctcacccaatgtgttggattccctgtgattcattacattattttcttcctgaagaaatctgaacacagagaacttgaagctgcagggg

SEQ ID NO: 4287 - DNA, 661 bp, Homo sapiens
  misc_feature [331]..[331]: Chromosome 11, SNP identification no. = rs518932
  misc_feature [331]..[331]: allele = c, t
  misc_feature [331]..[331]: n is a, t, c or g
tggactggttcacacatccccaatgacagagaagcaggaagcagggtcccaaggtctggctatagcccagattctagccaaagtagaatttctttaataattcaaattttgtctttataattaattaaaatgttatatgcttctccagaatatatatttatctgttttaaaatatgcttgtctctaaaatctttggataaaatatatatgccttaggaaaatatgtacttctcaccgtattaccatgtaggctcaggggcagagttccctatttgggaaacatagacaatcattgtcacaataaatttttgccagtaatgcagtcatcccngtaatgcaggagaggagactgaggctcaaaaaggttaagtgagttttctgagatcacctagggcttggattaaaaatttagtcccaaatgcttatccctcctctacccattctattaagtacttcgccttcctctctggcctgtagcccttgtcacttgcagaggcagtgtggaacttcgaagctgttcaagacatccaattttcagagagcgtggaggctgcagctggcctgtcaccgaacagcatcagctagaactttagagggaatggggcctccattcctcccatatgtagaactggattgtggattcagctgctgtctccaagaa

SEQ ID NO: 4288 - DNA, 661 bp, Homo sapiens
  misc_feature [331]..[331]: Chromosome 11, SNP identification no. = rs517918
  misc_feature [331]..[331]: allele = c, in linkage disequilibrium with rs518932, respectively
  misc_feature [331]..[331]: n is a, t, c or g
taaaatgttatatgcttctccagaatatatatttatctgttttaaaatatgcttgtctctaaaatctttggataaaatatatatgccttaggaaaatatgtacttctcaccgtattaccatgtaggctcaggggcagagttccctatttgggaaacatagacaatcattgtcacaataaatttttgccagtaatgcagtcatccccgtaatgcaggagaggagactgaggctcaaaaaggttaagtgagttttctgagatcacctagggcttggattaaaaatttagtcccaaatgcttatccctcctctacccattctattaagtacttngccttcctctctggcctgtagcccttgtcacttgcagaggcagtgtggaacttcgaagctgttcaagacatccaattttcagagagcgtggaggctgcagctggcctgtcaccgaacagcatcagctagaactttagagggaatggggcctccattcctcccatatgtagaactggattgtggattcagctgctgtctccaagaaggacaattgtcagagtcaaggaaggttaatgtgcccttagcagagatgtgccatctgaaagcctgggggccacctctatagaggatccaccagttcctggcagcctaggcaaatcacaactctgg

SEQ ID NO: 4289 - DNA, 661 bp, Homo sapiens
  misc_feature [331]..[331]: Chromosome 11, SNP identification no. = rs525588
  misc_feature [331]..[331]: allele = c, in linkage disequilibrium with rs518932, respectively
  misc_feature [331]..[331]: n is a, t, c or g
gttcacatccaaagacctgagaaatatgaagctgacagtgtaactctcagcctgaggctgaagtcctgagaagctgtcaaggctgctggtgcaagtcccagcgtccaaaagccagataccgtgagctctgatgtccaagggcaggagaagatgtgtggagcaactcaagaggggagagacagagaatctgcctttttattctatctgggctcccagccgatttgatggtgcccgcccacattgcatgagggcagattttccttactcagtccactgattcaaatgctaacctctcctagaaacacctaataacacttttccagctatcagngtatcccttaatccagtcaagctgacacctaaagttaatcattacaaccatcagctcacagcagctagagcttgagcttagacaggtgcctggtggccctggtgtctcataccacagtctgcagtatgggctgacctcaaaccatctccagtcctcccaggcaaggccgtgggcccagcaggctcttccctggggacctgcttctctgtgactgagttgcccagtgctcccttcctcgctcctatcttgtgtccccataatccctccccttgcctcccctgactccacctgattgtgggaaaggaaaaggtgaacattaaggtgtatgag

SEQ ID NO: 4290 - DNA, 661 bp, Homo sapiens
  misc_feature [331]..[331]: Chromosome 11, SNP identification no. = rs508479
  misc_feature [331]..[331]: allele = a, in linkage disequilibrium with rs518932, respectively
  misc_feature [331]..[331]: n is a, t, c or g
cctgcagaagatccaagggcaggaggagagaggccaaggtatttatttccctgtttccctctctgcttggtcacggtccaagggtggctgaatccctctgctaaaggctgtagcaccagtccaacagctccagatctcccaaagttccagaaacttcccattgcccttgcccttttagattcaagatacttccccatggcctgtggctccctgaactttccccacacctttgtaaagtccctttgactctgtccaattacccctttgagtatgctgtctatttcctaccagaaccctgcccaatagaagtattgtcagacgtagccgcggncttatcaagagagaaaaactggctcacagccctctcccatcagccaaccccatcctggtaagagaaggcctgagactgtgagtcttttggggaatacaatgagtttcccatcccctgtccattccaagccaagtaaaggaagcttcaggaaaatcacatattgaaagagggtgttgactacaaatgggaaacctgaccccacccactgctgggtacttaagctgtagaaagtcagaggcctgtccctagttctgctggagtggagctgagagaggctcttgggagctgcctgcgtgggcagagtttgaaggcttaggatatctcctgaag

SEQ ID NO: 4291 - DNA, 661 bp, Homo sapiens
  misc_feature [331]..[331]: Chromosome 11, SNP identification no. = rs11217560
  misc_feature [331]..[331]: allele = g, in linkage disequilibrium with rs518932, respectively
  misc_feature [331]..[331]: n is a, t, c or g
caggggctctgctagaccatgttgggggatgcaggtaacttggacagagatgtagaaatgaataggatacattccttgcttatctaggatcttgcgatcttgtggaatacttgattgtatcctgttctttattattcccacaagcggtaggctcctgagaacagaacccatagcagataatctcttacacatttactaaccatctgccgcaggcgaagaacctaaaagtcctaagtcacatggctcctagcccaagctgggctcatggcaggcatgcaacaaaaactgaaatttcacggggtgggtgtgatgggcctgcacaaacccctcncgtagagctgcgcggggagtatgagagcccttggtttgctctgggctggcttcacacaccttcttgagtgtttattttccaagcatctatcaaattcctactctatgctaggcatagaggactgtagcaatgaataagatcccatctttgccttcaaagaacctgatatctagcaacagagatggataaagtagaccacaaacagcaataaaacattttaggggccatgctaggagaaagccgggctcagtggaggtcggtgagaacagtgataggtttgaccagggctggggacaggaaaaggctttacatggagacggtgcttaagtg

SEQ ID NO: 4292 - DNA, 661 bp, Homo sapiens
  misc_feature [331]..[331]: Chromosome 11, SNP identification no. = rs4938738
  misc_feature [331]..[331]: allele = t, in linkage disequilibrium with rs518932, respectively
  misc_feature [331]..[331]: n is a, t, c or g
aggtgggagaacctcattccagctggctctgatctggccgcaatcgactcctggcctgcaatcacccccagggcctgggtaggcaaggctgggatgctgcctctgtgctcagaatcagccaggctgagccccctgggcccaggatgggcatctgtactccaaaccaggcattatgcaagtcccccgctcagctcagcgctgtctccaggccaagaggcttcaacggagttccacaaaattatattttcctctttgaaagcagcctttgcaaacagagcattgcttaattgagaagatatttagatctgtgtatctcttgtaaggtgcaagnctccccatggtgacattttaatggccaggggcatggggaggaaggtaaacactctttacctttgccgcagcctgggaattctcctcgtttgtcagatatgattagctgttacccttctggtcttccattgttattcaggtccctgcttgtcacagttacacccctttggaagctcacgcctcgctttctctccagctctctctccctctggtggcaccctgactggctagtaatttatgtatgacaatatgagactaattcggttattatgtcaaagggaaattgaatctagggttttagtgccgcatctgggagaaatcttcaaatgaa

SEQ ID NO: 4293 - DNA, 661 bp, Homo sapiens
  misc_feature [331]..[331]: Chromosome 11, SNP identification no. = rs3919865
  misc_feature [331]..[331]: allele = a, in linkage disequilibrium with rs3901231, respectively
  misc_feature [331]..[331]: n is a, t, c or g
agattataggcttgcctaaaaaaaagtgggggggggcggggggcgggggctaaagaatctaattcatactctggcattaaaaattggattacagtgccaggttcattgcgaatgccatatacatgtttgctattaacattttattttattaattgattgattgattccccagtgtatttctcaaaaacattttatttataactgatatttactagcctctaaattgtggagcattacatatattatctcatttaattctcacaacaactctaagaggtatgcgttattgttatgcccattttacttactgagaaactgaagtgcagggtgnccaggtaaagttggcgaagtcacatggctaacaagtggagaatctgagattgaagttcaagtttgtctgattccagcggcagcatgcttactacactatcttacaccaacttttttgtgccaagaaatgttatagtccagaggaaataaacacagggtgaggtaacatgacaataggataaactcggatttatgctaaggaagagcttcttgagcgtttggaagacactagaaatcgaagatagatacatcttcctggagttgttgtcagcaggaataaggcagaatgacagctagaaatctgtcccaacctcatctcctctgtgaatct

SEQ ID NO: 4294 - DNA, 661 bp, Homo sapiens
  misc_feature [331]..[331]: Chromosome 11, SNP identification no. = rs17127533
  misc_feature [331]..[331]: allele = a, in linkage disequilibrium with rs3901231, respectively
  misc_feature [331]..[331]: n is a, t, c or g
catatctcaacaaaattaggaaaaaatgcaaatgagaaaagacggatactcaagtgcagctcagttcagtccagtgccagctggccaggccttttgcggcaggcagcctataaagatgctctataaagatactgcacgcctgggtctggattctccagggagcaggtggctcagagagagcatcagtgacaagagcaaggcagatggtgggaaggcgagggtgtgggtgccacacggtggcatctcacacacttctgttcattccataaacaggtttagtaagcaccatttcctgggggaaagtctacttctggaaagaattgtctattgnaaatgaagatctttccctgctgcagaataggcttaaagaaacaagtgcaggcagacaagagggtcctccagaccatgtgcctagccaaaactttttttgttgttaatagagacaggttctcactatgttgcccaggctagtcccaaactcctgggctcaagtgatcctcctgccttggccttgcaaagtgctgggattacaggtgtgagccaccatagctgtcctggcctaaacttaatagtaaatctacatctgtattccggaaaacctatcagaataacctaaagtgttagagcttgtggaaaaaggcaatgtcaaaaaaagaaaaaa

SEQ ID NO: 4295 - DNA, 661 bp, Homo sapiens
  misc_feature [331]..[331]: Chromosome 11, SNP identification no. = rs7124162
  misc_feature [331]..[331]: allele = c, in linkage disequilibrium with rs3901231, respectively
  misc_feature [331]..[331]: n is a, t, c or g
taaaaccaatagttcagataatagctaactcacctgcaaggtggtccatgcaccatctggctactttaagagagttagtagaaagtgatgataggctgagagtggtggcttgcccctgtagtcccagcaatttgggaggcacaggtgggaggatcatttgagcccaagagtttgagaccagcttagacaacataacgagatcccatctcaatttctaattaaaaaagaggaagtgacgctaaatatttttataggtaaaagttttaatttgatctttttttggtccaggtaacttggattcatcatatgctttttctcctggacaatcagncaacacaattattcagtacctcatctgtaaactgcactgtgtcatcgctgtggttagtgctaaagaaatgtgaagtatgtcctttgttctcaaggatcttatgaaatacctgggcaaacaaaactaacaacctgaattatgttgtatcatactactgttaaaatccttcaatggctctctattataattagcatactgtgttcaataaggcttctttcattccccatcccatccccttagcatttttttttttttttttgagagatggaatcttgctctgtggcccaggctggagtgcagtggtgcgatctcagctcactgcaacctcca

SEQ ID NO: 4296 - DNA, 661 bp, Homo sapiens
  misc_feature [331]..[331]: Chromosome 11, SNP identification no. = rs10750238
  misc_feature [331]..[331]: allele = t, in linkage disequilibrium with rs3901231, respectively
  misc_feature [331]..[331]: n is a, t, c or g
gcccaggctggagtgcagtggtgcgatctcagctcactgcaacctccacctcatgggttcaagcgattctcctgcctcagcttcccaactagctgggactacaggcatgtgccaccatgcccagttaatttttgtatttttagtagagacggggtttcactatatgttggtcaggctggtctcaaactcctgacttcaggtgagccgcccacctcggcctcccaaagtgccgggattacaggcgtgagccaccgtgcctggcctccttagcgtttatctctatgtttgaaggctgttttatgtgtacacctgtaactttctgctcttgggnttgtttttctggccacgagtatgctaatcctgcacagggccagctgtaagtaacagagagttaatgcctgacagtgaagggatttggttaataatgagctcatgtccatccatggtgtcacaaatgacagcattttttttaatgggtgaatagtatttcattgtgtatatataccacattttctttattcatttgctgttggatacttaggttgattctatatcttggcttttgtaaatagcactgaaataaacatggacatacagatatgtcttcaatatactgttttcctttcctttgaatatgtacccatcagtgggattgctggat

SEQ ID NO: 4297 - DNA, 661 bp, Homo sapiens
  misc_feature [331]..[331]: Chromosome 11, SNP identification no. = rs10790585
  misc_feature [331]..[331]: allele = g, in linkage disequilibrium with rs3901231, respectively
  misc_feature [331]..[331]: n is a, t, c or g
aacatagatatgcattgacacatcaaattgtactccataaatacgtacaactgcaattttaaaagtaatgaaattatacattgaaaaataaaacagcccagcttcccggcctcctgggtgcgtgttctacttatactactttttggagtttctcagagggattgagacgcaggtgcagcctgttcaatgacacaccttttattggcttcattttctttcttctcggtcccactgccatatcttctaaataaactgtggctgctcaaacttgtctcaggacttgcttctgggagggtccaacctatgtcaaaggctctgtgtggtctggttnatgcctacctcccaacctcaattcacgccatgacattttgctcattgcgttccagccacactggcttttcaagttgtttacacctgttctctccctatgacatgttattttttcttctttacatgattggctctttctgatccttcacatctgtgcttaaatgttacaccaaggaggatgtctttcacaaccccagtcaaacatagtcttccatgttccaacctggtctttgcattcacagcatttaccaccccttattactgtacacgtgtctgtgtgttactgatatgtgatctgcttcccgcttgaaaacagtaaaaaaagttcctc

SEQ ID NO: 4298 - DNA, 661 bp, Homo sapiens
  misc_feature [331]..[331]: Chromosome 11, SNP identification no. = rs1111905
  misc_feature [331]..[331]: allele = a, in linkage disequilibrium with rs3901231, respectively
  misc_feature [331]..[331]: n is a, t, c or g
ggaccttctgagagatgaaaaacaaacacgatgacaattgccttgtggtcagctgttatctgtggatctggtactggtaggtgttaaaagctgggaatttagaagaaaagaatcatcactttgctccctttttactttgacagactattaagttaggtgtttctctactccatattttaaaatttattaatcaaaaaacaaggaaaatggaaagtgacaactcagctaattcccaaagaattttttctcaggggatgtattccctaaacattatcagtctaactttagtgtctataaaatttcgtggttctttttactgtagaaaacattnagtattaagacattttgttcacataattcattaaagtgttgttctagagcttcctttctgggtattttggtacatctttatagaattatagaatcaggtggatgaactaaagtatttgttagtgtcttttccacccctcattctataattttactcaaagcatgaaacttcttcattgctattttccatttatttatttatatagagacagagtctcactctgttgcccaagctggagtgtactggtgtgatcacagctcactgcaacctctgcctctcccgggttcaagcaattcatgtggctcagcctcccgagtaactgggattaca

SEQ ID NO: 4299 - DNA, 661 bp, Homo sapiens
  misc_feature [331]..[331]: Chromosome 11, SNP identification no. = rs10790586
  misc_feature [331]..[331]: allele = t, in linkage disequilibrium with rs3901231, respectively
  misc_feature [331]..[331]: n is a, t, c or g
aaaattctttgggaattagctgagttgtcactttccattttccttgttttttgattaataaattttaaaatatggagtagagaaacacctaacttaatagtctgtcaaagtaaaaagggagcaaagtgatgattcttttcttctaaattcccagcttttaacacctaccagtaccagatccacagataacagctgaccacaaggcaattgtcatcgtgtttgtttttcatctctcagaaggtcctatggctctccgtgtatttctacattcttctctgggtgtgtacttaatgtcacttgcttccaactgcacactccttgagggttgctntagatgatactatgtcaacttggtcaagtggggaactatatttcccagaattccctacctgatgtggttccagtttagagttgaccaaaagaacaatgtgcatgcgatttgggatgtcagagtgatgcaacagccattcctctcagaagttcatcacagtcagacatgttgtcagacagacaaagagatgagtaccttgtgggtcttaggtggttctggccctcctctgctctgcattcagcttgtcctccagactgtgggccccgatgaccaacagcagctccaggctgtgcacccacagaggcagtagttaacataaggccaaaattt

SEQ ID NO: 4300 - DNA, 661 bp, Homo sapiens
  misc_feature [331]..[331]: Chromosome 11, SNP identification no. = rs10790587
  misc_feature [331]..[331]: allele = t, in linkage disequilibrium with rs3901231, respectively
  misc_feature [331]..[331]: n is a, t, c or g
ccattttccttgttttttgattaataaattttaaaatatggagtagagaaacacctaacttaatagtctgtcaaagtaaaaagggagcaaagtgatgattcttttcttctaaattcccagcttttaacacctaccagtaccagatccacagataacagctgaccacaaggcaattgtcatcgtgtttgtttttcatctctcagaaggtcctatggctctccgtgtatttctacattcttctctgggtgtgtacttaatgtcacttgcttccaactgcacactccttgagggttgctctagatgatactatgtcaacttggtcaagtggggnactatatttcccagaattccctacctgatgtggttccagtttagagttgaccaaaagaacaatgtgcatgcgatttgggatgtcagagtgatgcaacagccattcctctcagaagttcatcacagtcagacatgttgtcagacagacaaagagatgagtaccttgtgggtcttaggtggttctggccctcctctgctctgcattcagcttgtcctccagactgtgggccccgatgaccaacagcagctccaggctgtgcacccacagaggcagtagttaacataaggccaaaatttcccacagacctctccgcaagtttctcttttgtgt

SEQ ID NO: 4301 - DNA, 661 bp, Homo sapiens
  misc_feature [331]..[331]: Chromosome 11, SNP identification no. = rs10790588
  misc_feature [331]..[331]: allele = t, in linkage disequilibrium with rs3901231, respectively
  misc_feature [331]..[331]: n is a, t, c or g
ttctctgggtgtgtacttaatgtcacttgcttccaactgcacactccttgagggttgctctagatgatactatgtcaacttggtcaagtggggaactatatttcccagaattccctacctgatgtggttccagtttagagttgaccaaaagaacaatgtgcatgcgatttgggatgtcagagtgatgcaacagccattcctctcagaagttcatcacagtcagacatgttgtcagacagacaaagagatgagtaccttgtgggtcttaggtggttctggccctcctctgctctgcattcagcttgtcctccagactgtgggccccgatgancaacagcagctccaggctgtgcacccacagaggcagtagttaacataaggccaaaatttcccacagacctctccgcaagtttctcttttgtgtccccactttagctgctggacatgattgtctctcacaatttcctgcatgcccctacttgtctgcctatgccagcactttgggcagacttgtttagtgtctcttttttttctgattgtgcaactcctccttccagatgttcatttccttagtgccttctactttggtatctcattcctgtaacaaaatttaatgtctaacagagctctaatttaaaaaaaatgtttttagtctctgtct

SEQ ID NO: 4302 - DNA, 661 bp, Homo sapiens
  misc_feature [331]..[331]: Chromosome 11, SNP identification no. = rs10790590
  misc_feature [331]..[331]: allele = t, in linkage disequilibrium with rs3901231, respectively
  misc_feature [331]..[331]: n is a, t, c or g
tagggcattggtgtggaagaccatcaattggggatgctgaaaattaggttagggtcatgtggaaagattttgatgaagccgagaatcttaagccccaaaattctgctaagcatcctttgcttgtagaaatattcttttctaggcccagcatggtggctcacgcctgtaatcccagcactttgggaggccaaggtgggcgaatcacttgaggccaggagttcgagaccagcctggtcaacatggtgaaacattgtttctactaaaactataaaaattacctgggcatgatggcacatgcctgtagtcccagctattcaggaagctcagtcangagaatcatttgaacctgggaggcagaggttgcagtgagttgagattgcaccactgtactccagcctgggtgacagagccttggtatgtctcaaaaaaaataaataaataaataaaatgaaaagaaaatgaaaaagaaatattattttctcctctatctgagaagtttaatttaccttgcctgaagaacctttaaggacccctccagaggtaactgtcttgtatgggagcactggttctcacctcaaccacctgggaggtgaagaagatctagaagatctcgttgcttctagatctctaaatggactcaagttctggaaggccccaggag

SEQ ID NO: 4303 - DNA, 661 bp, Homo sapiens
  misc_feature [331]..[331]: Chromosome 11, SNP identification no. = rs11219229
  misc_feature [331]..[331]: allele = c, in linkage disequilibrium with rs3901231, respectively
  misc_feature [331]..[331]: n is a, t, c or g
ggttgcagtgagttgagattgcaccactgtactccagcctgggtgacagagccttggtatgtctcaaaaaaaataaataaataaataaaatgaaaagaaaatgaaaaagaaatattattttctcctctatctgagaagtttaatttaccttgcctgaagaacctttaaggacccctccagaggtaactgtcttgtatgggagcactggttctcacctcaaccacctgggaggtgaagaagatctagaagatctcgttgcttctagatctctaaatggactcaagttctggaaggccccaggagtcacgtacaagtgtgacccatgaaaagntactatacacaccaaaaagattacaagattttgaaaaaatttttttaacagtttggtaattgattttttaaattgtaatttttagtttaaaaatatttaatggacaaataaagtttgaatattttaaggtgtgcaatgtgatgatttgacatatgtatacattgtataatgaggatcacaattaaattttaacatatctatcactacctatgttgtaaattagagtaccagaacttgttcatctttttcttttcttttttctttttcttgagacggagttttgctcctgttgcccaggctggagtgcagtggcatgatcttggttcactg

SEQ ID NO: 4304 - DNA, 661 bp, Homo sapiens
  misc_feature [331]..[331]: Chromosome 11, SNP identification no. = rs7127157
  misc_feature [331]..[331]: allele = c, in linkage disequilibrium with rs3901231, respectively
  misc_feature [331]..[331]: n is a, t, c or g
tctcacctcaaccacctgggaggtgaagaagatctagaagatctcgttgcttctagatctctaaatggactcaagttctggaaggccccaggagtcacgtacaagtgtgacccatgaaaaggtactatacacaccaaaaagattacaagattttgaaaaaatttttttaacagtttggtaattgattttttaaattgtaatttttagtttaaaaatatttaatggacaaataaagtttgaatattttaaggtgtgcaatgtgatgatttgacatatgtatacattgtataatgaggatcacaattaaattttaacatatctatcactaccnatgttgtaaattagagtaccagaacttgttcatctttttcttttcttttttctttttcttgagacggagttttgctcctgttgcccaggctggagtgcagtggcatgatcttggttcactgcaacctttgcctcctgggttcaagtgattctcctgccacagccttccaagtagctgggattacaggcatgcgccaccacgcctggctaattttgtatttttagtagagatggggtttctccatgttggccaggctggtctcaaactctcgacctcaggtgacccacccacctcagcctctcaaagtgccgggattacaggcatgagcca

SEQ ID NO: 4305 - DNA, 661 bp, Homo sapiens
  misc_feature [331]..[331]: Chromosome 11, SNP identification no. = rs11219231
  misc_feature [331]..[331]: allele = a, in linkage disequilibrium with rs3901231, respectively
  misc_feature [331]..[331]: n is a, t, c or g
cactgtgcccggccaacttgttcatcttataattgaaagtttatacccttctttgatcaacatgtcctcatttctcccatcccccagcccctggcaaacactgttctactctcttttactacgagctcaaaatattttgataatttttatggaaaaaaatctgagaaatatgtacaggaatggtcagatcaaggtaaatttattaatatgggttcactggccagagattctgcattcagtgttttaacctgaatggctgggagtggctctaacagtttgttttgatggttggatctatgcagagcacagaaggatcttgaaaaatggtaangtatcattggaaacttactcaggtggtgacatcaattgcagctgctgtttcagatgtggtttctttactagagcacatcaatatatcacctagaacctggtatgtagctattgatgtgacagatgctttcgtccctctctgtacttgttagtcaaaaccaccagaagtatattatcattttgacaaaccaatgctctattcagcactcggtgcattatttcatgaattgttaacacactttatgaagaacaaagaagaggaggaaataaagaagagctctgagccacagtcacaggaaaggaagtagggggagaaaagaagctttgagtg

SEQ ID NO: 4306 - DNA, 661 bp, Homo sapiens
  misc_feature [331]..[331]: Chromosome 11, SNP identification no. = rs10790592
  misc_feature [331]..[331]: allele = g, in linkage disequilibrium with rs3901231, respectively
  misc_feature [331]..[331]: n is a, t, c or g
tctaacagtttgttttgatggttggatctatgcagagcacagaaggatcttgaaaaatggtaatgtatcattggaaacttactcaggtggtgacatcaattgcagctgctgtttcagatgtggtttctttactagagcacatcaatatatcacctagaacctggtatgtagctattgatgtgacagatgctttcgtccctctctgtacttgttagtcaaaaccaccagaagtatattatcattttgacaaaccaatgctctattcagcactcggtgcattatttcatgaattgttaacacactttatgaagaacaaagaagaggaggaaanaaagaagagctctgagccacagtcacaggaaaggaagtagggggagaaaagaagctttgagtgagacactgtattagaaacatagagatctgcaaaggtgatatttaaaaagatctattaatgtgatttcctttttcactcttccttgtttgtgatatccctcctatacatccagagccttggtaaatttaaatctttacactaaggatttgtagagaaactctagatattatttatgaaaggttcctacctttcaagggaaggagtctgtagagaacaagggatgggggaaaagaagagtggggaagaagagaaagagaaaagaaggaa

SEQ ID NO: 4307 - DNA, 661 bp, Homo sapiens
  misc_feature [331]..[331]: Chromosome 11, SNP identification no. = rs3901231
  misc_feature [331]..[331]: allele = g, t
  misc_feature [331]..[331]: n is a, t, c or g
gaaggggagtcacctgccttctccaactgggagagaacctgagggactaactgcccattatacagactttcaacctaatcctcccttttctgtctacccctcttcccacctttgtatcttggtgcttccagtttctaaggcttttcaagtattcttgaacacagatcagcttgactctcattgacatttccttctgcaaacacttaggctttagctattccaactctctaaagtcagttgtttattcctctacttacattccagttttcaaaaatgtgttgctatctctggtctgttgttttcttctctccgttttatttgtctttatggncttataacgttcactctcattttagggggaactcagaactcaagagggagtgtagataaacttatgtttaattcaccatatataattcaaaacctgttttccttttctaaagcccagataattatatttataaacttcctagtttgaagatcatacttcgtcaatggaaaattctatctaacttcagtctaacctgttgtaatgcatgacccagtagttctcaactctggctgtatataataatcatttttctagctctgaaaaatgctgatacttggacctaccccagataaaattaatcagactctctgaggtgaacatgtgcagcaa

SEQ ID NO: 4308 - DNA, 661 bp, Homo sapiens
  misc_feature [331]..[331]: Chromosome 11, SNP identification no. = rs3851105
  misc_feature [331]..[331]: allele = c, in linkage disequilibrium with rs3901231, respectively
  misc_feature [331]..[331]: n is a, t, c or g
cccaaagaccgggtaatattttttaaaagttgaatttgacttttgcatattaccgtttcttttagaaagtttatttggtagatgtaacttaagaagtcaagggaagcttttctcttttttttttaggactttttttttgttttttcctaagaaagtcttgagtctttattccaattgatatcctggtagcctgccagttatgtcaaggatcctggggtagataggaaaatgagatactctgacaaaacattgatagaaacacatacagaccacacacctggctctcattggaatgtaagctcagaaagagaagagatttttatttgtcttntttactgctttattcccatctcctagaacagttccaggtgtagaatgagtgctgaacaactattttttaaatgaacgaatggatacttgctgaaaatgcactcataaaacaagcttatataattggtgatagtgaagcaacttgtttttcatgcaagggaagcacatgcatatcatatacactgtaagactattttctagatattatatctaatacacctacagttgtaaagaaactaatgacacttgtgccttatatccagatatcatgtccagactactaagaatatattgagaaatcaaccatatgagtaatgggaactataaaaca

SEQ ID NO: 4309 - DNA, 661 bp, Homo sapiens
  misc_feature [331]..[331]: Chromosome 11, SNP identification no. = rs11219240
  misc_feature [331]..[331]: allele = g, in linkage disequilibrium with rs3901231, respectively
  misc_feature [331]..[331]: n is a, t, c or g
tagtgcagtggcacgatctcgtgatctcagctcactgcaacctcagcctcctgggtacaagcaattcttctgcctcagcctcctgagtagctgggattacaggtgcccgccaccacacctggctattttttgtatttttagtagagatggggtttcaccatgttggccaggctggtctcaaactcctgactttaagtgatccgcccgcctcagcctcctaaagtgctgggattacaggcatgagccactacacccagccttaactatttttaagtgtggaattcagcagcattaacgatattcacattgttgtacaataaatcttcagaangttttcatcttggaaaactggaactctgtacacattaaacaacaactccccatttccctcttctcgcagccccctagtaaccatttttctactttctgcttttatgaatttgactactttatgtaagtggaatcatctagtatttatctgtttgggactggcttatttcacttaatatgatgtctccaaggttcatccctgttgtagcatgtgatgggattttcttactttttaaggatgaataatattctactgtatgtatataccacatttggtgtatccatttatcattcaacagacacttgggttgttttcaatttttaattattg

SEQ ID NO: 4310 - DNA, 661 bp, Homo sapiens
  misc_feature [331]..[331]: Chromosome 11, SNP identification no. = rs558021
  misc_feature [331]..[331]: allele = t, in linkage disequilibrium with rs10502270, respectively
  misc_feature [331]..[331]: n is a, t, c or g
atatttgtctcttttgtttactgctacttccctaacacctccaacaataggtgtttattacatactttctggatgcatgaaagaaaaacgaagaaactcatccctcagtacaggaactgtatgttctgaatgattgcattaggtgtgctctatacatttttgcctctcttaacagtctacaattccttgactctggggccttctagttggtatgccccctattaaactacaggcagatttttattaagaaaattcactgcagtaagtatttatatagagcaataattatttgtaactttttgttggtcagtttagcaacaaagcttcctangcttagcaattacgtgcaatcattttccctgttcatgtaacagtcttctcatatgagaataatggatggagcagtatttttatttagattgaactttcgctgtactctttatgatagttctgatcacagaaaatgattactcctccaccatgtcctctcaaaaaataaaaaagttgactagttgaaactcccaacccactcttcaaaaacaagaaacacaaaacaaaaacctaccaggaaataaacatgaatatctaaggggatgtgagggtgttgtcagttcactttattaatcagcttaacacaatccagcctaacaaaataaattag

SEQ ID NO: 4311 - DNA, 661 bp, Homo sapiens
  misc_feature [331]..[331]: Chromosome 11, SNP identification no. = rs2282646
  misc_feature [331]..[331]: allele = g, in linkage disequilibrium with rs10502270, respectively
  misc_feature [331]..[331]: n is a, t, c or g
ctttacagcttctggaagtctttacataaccctacaatgctctcaacctcctctgaagagtccctatctttatgaattgccaaataaactagtttgtgctgactgattccttttttagaatttgaattgcattcctccttctacctgaaacctcggtgtacacacgtgcatgcgtgcactcacacacactaaagagaatagaaattgcacattaagaggtatctttgtgctggtctgacaatcactttgttcctttttgttattaaagataaaaaaggtggtgtctaaagaaagctgggctcctccttgcttgatcctcaggacttccgcnaggatgaattaagttattccacttattccaaggagatgtgcttacatttgaaacattgtatcagttactttgccacaataaaggttagtaatcacgtgggttggccatccactttgtggctctttcagtctttccctctcccataaactagattagtgggttagtcagccaacatcactagaaatataaggagatggaaataattgtaggtatatttctctcagctattgtggctggactatttaggtcagctgagggaagacgctagaggtaaaacaaactatttttaaaaatactggtgtggggccaggtgcggtggctcacgcttgc

SEQ ID NO: 4312 - DNA, 661 bp, Homo sapiens
  ZNF202
  misc_feature [331]..[331]: Chromosome 11, SNP identification no. = rs679597
  misc_feature [331]..[331]: allele = a, in linkage disequilibrium with rs10502270, respectively
  misc_feature [331]..[331]: n is a, t, c or g
aacagggggtggacgggtgtagtttcccgaaggttcacaaaactattcacttgagaaatattagtaccaaatcttctttcattaagtctacctggattgtcctcaaagactatttcccaatctggagtctggtgaatttctggttctcccaaaacaggcctgtgtatatcctccaaactcagatcttcctgctccagacactcttcctcatctttactcctatctcctgtagaaagggtgagaggaaaaagggggtcactgtagcggcaacaatgccttctacacaatggggagatttttacaaagggttttgagatggcaagactaaatngaatgcctgtcctgtgccaagcactttctcatattgttatgctatcaacaaaccttggtatgcacaaatataatcttcattttacaaatgcagagattgagaatcgagggtttaagggaattgtacagtaaatggtatagctgcaattccaaaagttaacatttttctttcacccttttgtattacattgctatcagacaaatgatgggaggagaaaagaggagggcaatgacagaagaaatggctgtcagagggagaaagcagtactggctgacatgttagaagaactgatgagagcggggccctacagagagagagaagcactgccta

SEQ ID NO: 4313 - DNA, 661 bp, Homo sapiens
  ZNF202
  misc_feature [331]..[331]: Chromosome 11, SNP identification no. = rs687414
  misc_feature [331]..[331]: allele = c, in linkage disequilibrium with rs10502270, respectively
  misc_feature [331]..[331]: n is a, t, c or g
tgtggccgtatgcttttcccaggaccagtggagtgatctggacccaacacagaaagagttctatggagaatatgtcttggaagaagactgtggaattgttgtctctctgtgtaaggaatttcaagtattctagagtgttctaagcccagagatctttttcctgctggaaattttgggggatcttagaccttagattgtatgcagtgaacttctcttatgccttccccaccaataaaattgagggattaggtgaaaaatatggtgtcctttcaagtaaaagataaatggatggaaatggaaacctctaataggaaaacaaacttgtaatatnacagctttagtgcagaaatatttgaagtaagcacatgagttttaaaacagtaagagttggagataatctttcttgaatatgggaaaagaggataaggtgtacaatggtataattattaagttgcaggtgaaaaccacaagaaaggcaagagatacgcagtccttggttaaaagtacacaaactaaagagatgaaagatttcatcacctgagctagctatgtatttgccccacaacctaccaaatagaaaaggaccgctcttaacacagggaattgttgagccaatcgtgatatcctattttccctctcttgagcagcatttccaatcccc

SEQ ID NO: 4314 - DNA, 661 bp, Homo sapiens
  ZNF202
  misc_feature [331]..[331]: Chromosome 11, SNP identification no. = rs1144507
  misc_feature [331]..[331]: allele = a, in linkage disequilibrium with rs10502270, respectively
  misc_feature [331]..[331]: n is a, t, c or g
cctgtttatgggggactctagctggcggtactgtctcctcttgacatcctggattctgtgatgtctttccatacagtctatctacccagcttccttggtataggagaaatgtccgagaaatgtccccctccttgcctgccttctgccacaatcccccctttctgctgatgcttcccaccgctctcctgcagggtctggagctcctcttcctggtgtggacgctgctctgccggtgcccccagatctgggctctgtgtggtttcctcaggagactgctcgggggtcgagctttgcacaggatcctgcagctcattaggtgactcaggctccnctcctaaatgcaccgtctcctctgacaggacttcctggccgtgaacatggacagtcacctgggaataattccaacttccagtcaccatggagtcaggaggaagttcttggttgtcacgggagcttattttaggagaagatgcctagagaaaacactcccagagggacccagacaaggaggggaaactccagtttcaatggagcaggcaaggaggagctgaaggttatcctccccaggacaaggcaggggatgcgcaggcctgcactgctctctcaccacccccagcctgggcccctgtcacccaaggttccttcccatctccacctgtcc

SEQ ID NO: 4315 - DNA, 661 bp, Homo sapiens
  ZNF202
  misc_feature [331]..[331]: Chromosome 11, SNP identification no. = rs2282642
  misc_feature [331]..[331]: allele = g, in linkage disequilibrium with rs10502270, respectively
  misc_feature [331]..[331]: n is a, t, c or g
ccctcatggttggtgtttctcaaccatggatacacattcgaactgcaagtagcatctctaaacatacagttacctgaattgactgaatcagagtgtctgaaaaatgatgtgtgatactatgttttgcaaaatctccacaggtaattctgttgtactttgcttatagttgagtactgcagggatcttaggaagttagagcagtagtccaggcaggagatgatgaaggctcaaactaaagcagtctgtaggaaggaagagaagggaaccggtttggagacttaagcgggggaattggcagtatttgtgaagtggaaatgcagtattttcttgnagagtatgaaccttgcctaggaaagggagtagaggaccatacctttagttgtaaattatcctctcccaactggatctgttgatttatggctatggtggttggggaaaagaggatttaaccatttgaagaagtttgtgtagaggattatgattgaactcaggctgttgtccttgtgtatagtttcatgcttatactcttgtttgtctttacttctctatccagggcccttggaagaaaatcctcgctgtgtccaggctgaggcggggggctaatgacagtgtgagctctagatggtgtgagaccaccccaaagccaagaaatggctacagc

SEQ ID NO: 4316 - DNA, 661 bp, Homo sapiens
  ZNF202
  misc_feature [331]..[331]: Chromosome 11, SNP identification no. = rs1144505
  misc_feature [331]..[331]: allele = t, in linkage disequilibrium with rs10502270, respectively
  misc_feature [331]..[331]: n is a, t, c or g
taaaggtatggtcctctactccctttcctaggcaaggttcatactctgcaagaaaatactgcatttccacttcacaaatactgccaattcccccgcttaagtctccaaaccggttcccttctcttccttcctacagactgctttagtttgagccttcatcatctcctgcctggactactgctctaacttcctaagatccctgcagtactcaactataagcaaagtacaacagaattacctgtggagattttgcaaaacatagtatcacacatcatttttcagacactctgattcagtcaattcaggtaactgtatgtttagagatgctacntgcagttcgaatgtgtatccatggttgagaaacaccaaccatgagggagatgtgtaaggttatgagcgaaagttctggagtcaagctgcctgggtttgaatcctggctctgtcgcttactaggtatttccagagtgggaccataggcaagttctcattctcctaatgccagtttctctgtctatagaagggagataataatggtttttatctaataggcttactgtaaggattaaatgtattactaaagcctatgagcattaaatgtattactatctttgcttagaagagtgatggcaccagctattatctttctaaattatagttccaa

SEQ ID NO: 4317 - DNA, 661 bp, Homo sapiens
  ZNF202
  misc_feature [331]..[331]: Chromosome 11, SNP identification no. = rs1144502
  misc_feature [331]..[331]: allele = a, in linkage disequilibrium with rs10502270, respectively
  misc_feature [331]..[331]: n is a, t, c or g
aaacctttttcatgttagtaaaatcagttccaaaatcctgggaatgacacgaagctctttacaatcagcccccaatctatttttcaagcttcagatcctaccttttccctgtatcacctggttataaaaaatgcattgctgatctccctacaacagggtgtcttttcagtcttccatgtctttttgaaggttgttccttctgcacaggctactctccacccttctcctttccacgctacatggtgtgttctctttctttttaacgggtcttgtctttattcccacaatttacagcttaggtccctctcacttctcatctggatgactgcanctgcctccaaatgtgagctatctgcctccagatttgtcaccttcacgtacccactatgatcagaacgagctctcttggcaaacgtgctcatgtccctttcctatctaagatccttccatcactccccgctgtcttgttaagtgaaatacaaacttcaaacattctacattaggttgacgttcatcttgttattctcttcgccctcctctccaatcctttcagacacacacgcacacacgtgtgtacatgcaaagcacacaagagtcccgtgttctttagcttttgaatatgctgtttcttctgattctttatccttggttaggttaaact

SEQ ID NO: 4318 - DNA, 661 bp, Homo sapiens
  ZNF202
  misc_feature [331]..[331]: Chromosome 11, SNP identification no. = rs1880058
  misc_feature [331]..[331]: allele = t, in linkage disequilibrium with rs10502270, respectively
  misc_feature [331]..[331]: n is a, t, c or g
gggatcaaagaaaacatctcagaagacatgaagcttgagcttatgtcttgaaaaatttaaagtttaacctaaccaaggataaagaatcagaagaaacagcatattcaaaagctaaagaacacgggactcttgtgtgctttgcatgtacacacgtgtgtgcgtgtgtgtctgaaaggattggagaggagggcgaagagaataacaagatgaacgtcaacctaatgtagaatgtttgaagtttgtatttcacttaacaagacagcggggagtgatggaaggatcttagataggaaagggacatgagcacgtttgccaagagagctcgttctgntcatagtgggtacgtgaaggtgacaaatctggaggcagatagctcacatttggaggcagttgcagtcatccagatgagaagtgagagggacctaagctgtaaattgtgggaataaagacaagacccgttaaaaagaaagagaacacaccatgtagcgtggaaaggagaagggtggagagtagcctgtgcagaaggaacaaccttcaaaaagacatggaagactgaaaagacaccctgttgtagggagatcagcaatgcattttttataaccaggtgatacagggaaaaggtaggatctgaagcttgaaaaatagattgggggctgattgt

SEQ ID NO: 4319 - DNA, 661 bp, Homo sapiens
  misc_feature [331]..[331]: Chromosome 11, SNP identification no. = rs9326264
  misc_feature [331]..[331]: allele = c, in linkage disequilibrium with rs10502270, respectively
  misc_feature [331]..[331]: n is a, t, c or g
agtaaaacagaattctcttagtggttcccaagatgatggaaccacaactcatcacaaggaatcttcaggttgcaccgggaataatccaaatgcaagtcacacaacacttggcatttgaaaaaaaaaaaatcattttccattgaggatttaaatcaattttaataagcgcaaaatcagacatcaaataaatggaactacaatactaattatttatccagacaaagctttccaaaccccaccccaactcctacccctggaagacagaattaatacatagggtcttttggcttaataaaaggacttctagtatcttaaaagtttgagaaccgangtccagtgaagtagacttggaatcctcattgttttcacgcagcactaggtacaagagattccacagtatggatcctacaacgtatgcattgacagaagagttcctgctctctcaaagggctttgctctccaaagaaaaaagaacatgtaacagtgccacaccaaacttgccatttaaaaatgcccttcagaaatcacaagctgagatttctggtgcttgttttgcatttactttggcagcctaggaagatgaaggaaaacagatcagcaatagaaggaatgaaggaaggagtctttgtggggtaagagatgggaaatgaataggaggtac

SEQ ID NO: 4320 - DNA, 661 bp, Homo sapiens
  misc_feature [331]..[331]: Chromosome 11, SNP identification no. = rs1940185
  misc_feature [331]..[331]: allele = g, in linkage disequilibrium with rs10502270, respectively
  misc_feature [331]..[331]: n is a, t, c or g
ccccttctctataaaaaatttaaacattagctgggcatggtggcatgtgctgtagtcccagatacttaggaggctggggtgggaggatggcctgaacctgggaggcagagattgcagtgagttgtgatcttgccactgcactccagtcttagcaacagagtaaaccctatctcaaaacttaaaaatctgtgtttggcccctagccgtcctcagctcttgagtaaatctcagcatcctaggctgttacattatggcccaaatattcaatagagatgctgtatatccttgttcctctcaaaacccctcctcatcaccatcaaaaagctggttnagttctctacctttagataaagaatcatcccaagactcaacatgagctgccgtgacttgtccaagatgacacctctttacaatgtagagcagtggacagaacacaggtcaccctccgccgaaggcaactatctactgtctaacattgcctcctaggcctgccatatataaccatcaaaaacagtttagaataaagtgaattgttacaatttttatttttcatttttgtgtttacatttactctcaatgacatgtttattcccacctaatatcttgaggctaaccacaaaatctgcagcatttccagacagaagatacttgtgacttccct

SEQ ID NO: 4321 - DNA, 661 bp, Homo sapiens
  misc_feature [331]..[331]: Chromosome 11, SNP identification no. = rs3741114
  misc_feature [331]..[331]: allele = g, in linkage disequilibrium with rs10502270, respectively
  misc_feature [331]..[331]: n is a, t, c or g
cagtggggagacagacgttaagccatgcccacgacaagaatgacttctgagattccttctctggatcatgatttagtcttcagtggaaacctggtactcctcagattcctctggttcaacaggcggggatcccatcccttatcatctcctcaaatgctaaaggacccttgagcaaagccaggaggaagtcatctagacgtgaaacagggagtatccacacaggctgtgttaatgacaaagctaaaaacatagtaaatgacttttgaatttactgctgttatgaattatctatagcaacacctccggtcagctctgttatatatgttattgngttatttcccattaaatgatggttcctctgactatctgattggcattgactatgtttgttgtagagattgcatacatctagtttaactctggctgtcaaatgagagcagttactcttatcaggatgggtgtcaggtttgatgtcccctccttttcctgcttcaggttaatttgtcatgttctgttttaaactgagacatatagcttgacctcctttatttaggccattaactgctctggggtagttttcctgaaggttaaaaagcctagcttcatgatggaggttaaccaacatgaccatgatggccaggtgtataaatctggcctctta

SEQ ID NO: 4322 - DNA, 661 bp, Homo sapiens
  misc_feature [331]..[331]: Chromosome 11, SNP identification no. = rs10893083
  misc_feature [331]..[331]: allele = a, in linkage disequilibrium with rs10502270, respectively
  misc_feature [331]..[331]: n is a, t, c or g
ttttcctttttatggttagatttggaatttatttttgtgaatgatataaattggggattctaatctaatatcagtggtaatcaatttctacttggaaaacatggagtatgagatatttacataatagaggatatatttacatacaaaagatatattccatatgtgatgtgatcagaattctgtcagcgcagttagctggtccttcatttgtcaatgattttttgagtgactgctcttacaagacactgtggtaggtatatggaacagaatggagaataagaaagacgtaatatctgttctcgatctaactttcaactggtgtgtgtgtgtntgatatgaaggagttggggaagaagaaaacagtttaaataacttacgcaattcactaactgtggttatttaattatgattaattaaattaattataattattgtaagttctccagagaaatacagagtgctacaagaacttgttactggaggtcctaatcctggtggtggtgctgttagagaggtagttagggaaagctttcttgaatagtgacatttgaactgagtctgtggaatgcctgggcaggatgagcctgggggtgaggttgggagatggggtataaaccaaaaagtgtctgagacagacctcaattgatttagaggtttattt

SEQ ID NO: 4323 - DNA, 661 bp, Homo sapiens
  misc_feature [331]..[331]: Chromosome 11, SNP identification no. = rs11219270
  misc_feature [331]..[331]: allele = t, in linkage disequilibrium with rs10502270, respectively
  misc_feature [331]..[331]: n is a, t, c or g
aattataattattgtaagttctccagagaaatacagagtgctacaagaacttgttactggaggtcctaatcctggtggtggtgctgttagagaggtagttagggaaagctttcttgaatagtgacatttgaactgagtctgtggaatgcctgggcaggatgagcctgggggtgaggttgggagatggggtataaaccaaaaagtgtctgagacagacctcaattgatttagaggtttattttgccaaggttgaggatgcaccgtggaaaagtagacacaagttgcagtaggatctgtggcctgtgctttttccaaagaggacttcaatatntaaagcagaaagagcaggcaggagaggaaggaggaaagaagaaaaaggggagggtaggcacctagcaagaagtcccattcttgtgaagctctgaccagtgctcagcaatccacattttacatctgaaaagaaagtagtggggacaaagtcaattatgcatagatctgcattttctatgaggtaaagtaaatgtgaagtaaagtaaatatgcctagaaacaaaaggaatttcagaaacacatgtgtttagaaacaaaaagtatgtgtttagaaacaaaaaaaaaaggaaggcagtttttgcgtgatttagctcccaagcatagcttttccc

SEQ ID NO: 4324 - DNA, 661 bp, Homo sapiens
  misc_feature [331]..[331]: Chromosome 11, SNP identification no. = rs10893085
  misc_feature [331]..[331]: allele = c, in linkage disequilibrium with rs10502270, respectively
  misc_feature [331]..[331]: n is a, t, c or g
ggcagggataattagtaatagtgaagtgagctcagctgaaagtgtgcataggagttccactctcctagttattcaatccaagtctggctgaacaccaagtatagaaagtgaatcgttctggaagagctatttgtacatgacatttttataattagagtcatttagacttgcaagaagaatttgtaattctaagtgacctggtggtgagccacttggtcaggcactagattagatacctggataagtatataattatctgcattcaaatgtgtctatattatactttatattttctcatatttgatttttacactctgatccccaagttagntggtcatttgtgaataccatggagtcataaggtcctgataaaaacagaggtggctttagagatataccttaaggaagacagcaggagatctagtctgagacacgttgagaaaaatggtctgtagctggataagcttggaaaagaccatatactctatcctccttttggaaatttataatgcatgtgaagatccctagaaatgaaaaacaaagtcgagtttattacttgacatgtaagggagagctatatcattcaatgtgatgggagtgagtctttctgagttaaaagaggaaagatgaaatctaggataagaactggaagttttgcttc

SEQ ID NO: 4325 - DNA, 661 bp, Homo sapiens
  misc_feature [331]..[331]: Chromosome 11, SNP identification no. = rs10893086
  misc_feature [331]..[331]: allele = t, in linkage disequilibrium with rs10502270, respectively
  misc_feature [331]..[331]: n is a, t, c or g
tctgcaaccttgccggcatctgttatttctcttttactttttaataatagccattctgactggtatgagatggtatcccgttgtagttttgatttgtatttctttaatgattagtgatgttgggcatttttttccttgtatttgttggccacatgtatgtcttcttttgagaagtgtctgttcatgtcctttgcccattttttaatggaattgtttgttttttgcttgttgaattgtttaagttccttatagattctggatattagactttcgtcaggtgcataattttcaaatgttttctcccattctgtaggttgtctgtgtaccctgntgatagtttcttttgctgtgcagaagctccttagtttaattaggtcccacttgtcaatttttgtttttgctgcagttgcctttggagtcttcatcatgaaatctttgccaggtcctatgtccagaatgctatttcctatgttttcttctagggtgttttatagttttaggttttatatttaaatctttactccatcttgagctgatttttgtatatagtgaaagggagggatccagtttcaatcttctgcatatggctagccaattgtcccagcatcatttattgaatagggagtcctttccccattgcttgtttttgtcaactttgttg

SEQ ID NO: 4326 - DNA, 661 bp, Homo sapiens
  misc_feature [331]..[331]: Chromosome 11, SNP identification no. = rs7110051
  misc_feature [331]..[331]: allele = g, in linkage disequilibrium with rs10502270, respectively
  misc_feature [331]..[331]: n is a, t, c or g
tctctgtggccacggctccttttctttaaaacagcactctaccttctctggacactggaggctgcccacaatctccttcatgtctttgcctcccctgtaggtgaaggaaagtcagattttaggcatggttccctgaaagtcttcttgtaattcatatcattcttgatgttcaggaggcttcaccgttggatagacttctgtaattctaggatttccaactccgagaactaatacccctgcagactaatacccacacacacacaaatgcacacacacacacacacaaacacacacgttttttcccggtagaatcagtaccaggaacatagcntggtacatgatatcaatatatcagtaagacataaacatgcatgaataaatgttgtctatttgaagtttcatgaattgaagcctggtggtattctcatacctgttcttccccccttcctccttttcttggatctgccaaaatgtttttatcctaccctctgtctgccattagacatgaaacccttaaggtcataggctaggcccagagaaactaatatttatgagatttgaaggcaaatttttaaaaacttttttaaaataataatataacccagatgttccaacacctctagatttaggttaccttgagtacttgcccaagcccctgcaa

SEQ ID NO: 4327 - DNA, 661 bp, Homo sapiens
  misc_feature [331]..[331]: Chromosome 11, SNP identification no. = rs11219274
  misc_feature [331]..[331]: allele = t, in linkage disequilibrium with rs10502270, respectively
  misc_feature [331]..[331]: n is a, t, c or g
aggcatccccattcttaaactgctttctaggtgccctgacgctggggaatttccactgacttcttcccacagactcctctgctttgctccattttggggttccttttttcttcctttctctgtcattttcttttttgagaaatattaactattacctttttttcctcattcagggcactctaaaccattctttgatgacagagctcatgataatattgatgtccttaggttctctctcttcctttatctccaaatgatctatttctcctgcacagctccaagacagttccctctctaagagaaaatcaggtacagcagttgagataataanatttttgcctcattacattttgttttgaattttcaattcaatattaaaaggaatgtgtgcagtgttgatgaaaggagtcaaactctgcaaaatattggaagagatttattctgagcccaatatgagtgaccatggcctgtggcacagccctcaggagatcctgagaacatgtgcctaaggtggttggggcacagcttggatttatacactttagagagacatgagacatcagtcagatacatttaaggtatacattggttctgtccagaaaggcaggacaacttgaagtggggagtggggggcttccaggttataggtagatttaaaaat

SEQ ID NO: 4328 - DNA, 661 bp, Homo sapiens
  misc_feature [331]..[331]: Chromosome 11, SNP identification no. = rs11219277
  misc_feature [331]..[331]: allele = a, in linkage disequilibrium with rs10502270, respectively
  misc_feature [331]..[331]: n is a, t, c or g
tctccaaatgatctatttctcctgcacagctccaagacagttccctctctaagagaaaatcaggtacagcagttgagataataatatttttgcctcattacattttgttttgaattttcaattcaatattaaaaggaatgtgtgcagtgttgatgaaaggagtcaaactctgcaaaatattggaagagatttattctgagcccaatatgagtgaccatggcctgtggcacagccctcaggagatcctgagaacatgtgcctaaggtggttggggcacagcttggatttatacactttagagagacatgagacatcagtcagatacatttanggtatacattggttctgtccagaaaggcaggacaacttgaagtggggagtggggggcttccaggttataggtagatttaaaaatgttctgattggcaattggttgaaagagttactatcaatagaaaggaatgtctgggttatgataaggggttgtggagaccaaagttttatcatgcaaatgaagcttccaggtagtaagcttcagagagaatagattgtacatttgtaaatgtttcttatcacacttcaggtctgtgttgatgttaaatgctggttggcttttcctgaattccaaaagggaggagggcataatgaggtgtgtctgacc

SEQ ID NO: 4329 - DNA, 661 bp, Homo sapiens
  misc_feature [331]..[331]: Chromosome 11, SNP identification no. = rs12295819
  misc_feature [331]..[331]: allele = a, in linkage disequilibrium with rs10502270, respectively
  misc_feature [331]..[331]: n is a, t, c or g
taatggtcttttaatgctagtttttctttactgttgggaagagacatatctaatactcattatcacaaactgaatcacctgcatcatcattccctaaaaagatatcttgcctgaagacaagggtcagatcagtaggtttgtagcctactttgagggactttgcacactaaccctgaaaccagcccaattgttccacacaaaagatatttatggatttttaaatgaacacagaaattgacactctgtcttaaaacctgaaacttacatttgtcttaactgagttccttcctcaggaaactgaccctcaggcaagagactgaaacccactagntcaccaatccggacaacaagatgccaggcccctcattcatcatgatggcttccttacccctccctaattcctattttctcaccttaccagctcttcttccttacccctctctaactcctattctccctcccttccactatatataaacctcccaaatttagttggttggggagatggatttgagactctacctcccatttttcttggctgcagcattcagttaaagccttcttccctggcaatgctcagtgactcagtgattgatgttctgtgcagcaaacaccaggacctgactgaaccctgggggttttggtgacaatcctacatgtg

SEQ ID NO: 4330 - DNA, 661 bp, Homo sapiens
  misc_feature [331]..[331]: Chromosome 11, SNP identification no. = rs12282787
  misc_feature [331]..[331]: allele = g, in linkage disequilibrium with rs10502270, respectively
  misc_feature [331]..[331]: n is a, t, c or g
taatgctagtttttctttactgttgggaagagacatatctaatactcattatcacaaactgaatcacctgcatcatcattccctaaaaagatatcttgcctgaagacaagggtcagatcagtaggtttgtagcctactttgagggactttgcacactaaccctgaaaccagcccaattgttccacacaaaagatatttatggatttttaaatgaacacagaaattgacactctgtcttaaaacctgaaacttacatttgtcttaactgagttccttcctcaggaaactgaccctcaggcaagagactgaaacccactagatcaccaatccngacaacaagatgccaggcccctcattcatcatgatggcttccttacccctccctaattcctattttctcaccttaccagctcttcttccttacccctctctaactcctattctccctcccttccactatatataaacctcccaaatttagttggttggggagatggatttgagactctacctcccatttttcttggctgcagcattcagttaaagccttcttccctggcaatgctcagtgactcagtgattgatgttctgtgcagcaaacaccaggacctgactgaaccctgggggttttggtgacaatcctacatgtgagccctgaact

SEQ ID NO: 4331 - DNA, 661 bp, Homo sapiens
  OR6X1
  misc_feature [331]..[331]: Chromosome 11, SNP identification no. = rs10502268
  misc_feature [331]..[331]: allele = c, in linkage disequilibrium with rs10502270, respectively
  misc_feature [331]..[331]: n is a, t, c or g
attttctcccacctcttttctagaccaggaaaagattctttgtctacaatgtcacaagctctagtgcctttccacaaaacgatgagagacagagaagtatttgaatttgcactaatggccaatataactggccacgaacgtgatctctttatataggatagatatggaattatcttcattccccatgcagagaagagtggcaatctctatagctcaatataacatttccaagggctacacattctaccatttggagaattagacctatgaattccacaagcatttgttgagagcttactatgcttcaagtactgccaggcaattaaagagnttatcagatagatagatagataggtggatagatagatagatagatagatagatagatagatagatagatagatagatagataggtggatactatatatagtataataattgcaacatgactcagtgagggaaagtgtagagctgtgcacagattgttttagaaacacttagaaggggctcttcgcccatctttagcaggggttaaggaagtttttctaaagaaggagaggcctaagctgagtcctagagttcaaaaggaaatgaaagtgaagtaaggagagagggggaatgcattccagacaaggattcagtttttgtgaaatagaacca

SEQ ID NO: 4332 - DNA, 661 bp, Homo sapiens
  misc_feature [331]..[331]: Chromosome 11, SNP identification no. = rs10502270
  misc_feature [331]..[331]: allele = a, g
  misc_feature [331]..[331]: n is a, t, c or g
agattctggtcacagacagtactgccgtggtatccaggtgaccatgtgggacacatacaggggacagacatactctctctgcttttgtcaggaacatggcttggtttggtagcatgagggcccaggagtagcagcagcagtggcagcagaaatgataccagcagaagtggcagtgcctgctgagggggctggtccacagcagaaggaatgctgagcaagtagaagtggcagaaatgaggaatcaggcagtagctgtcctgacagctgcacggactgggttttgagcacatgagaagttttgtgagatgcagagggaggtggggatgtctcnagttagcaggtaaaagcaatgttcagagaaacacaggaaagcaacccaaggaacctaaagttatagagctaagatgctggattaaacactgcagtctatatgcctattacaattcaatcctacactctagacttcttcttccttttaaaaagtcacaatgtatagggtcaaatggattcctccatatccaccagggtccaagtcaccagatcctgttaactttacttcttactcactctctagtgtgtgtcctttccgtctctccctggctccggtaaatcatgctgtcatctcccatcaggattcgaacacagcctcctaacaggactc

SEQ ID NO: 4333 - DNA, 661 bp, Homo sapiens
  misc_feature [331]..[331]: Chromosome 11, SNP identification no. = rs7103374
  misc_feature [331]..[331]: allele = a, in linkage disequilibrium with rs10502270, respectively
  misc_feature [331]..[331]: n is a, t, c or g
tgctcttcagcctaggaaacagagtgagaccctgtctcaaaaaaaaaaaaaaaaaaaaaaaaaagtgctgagtttccattgtatgaatatacacgtcttatttattcatatattagtcaatgagtgtttgggttgttttagtttttactattatacataaagtcatggtgaatactcatgtaggaatatttttgtgggtgtctatttttatttactttaggtacatgactaaaagtgaaattcctgagtcataaggtctgtgtatgttccactttttgagaaacagccaacctgttttccaatgaggttgcaccatttcacaggcccatcnactatatgagagttctagttgttccacattttcaccaacatttgctgttgtcagtttaaaaaaattagatatgatagtaggggttggattttctcattcttaatttaatttgcatttccctgatgaccagtgatgttgaacacattttcatatgcttattaacagtttctgtatcatttttgtgaagttagtttaaatattttacccacttaaaaatagataatttttgttttttattattgagtcatacaattgctttattctaaagcagggcatgcacctgtaatcctagcattttgggaggcttaggtggaggattgcttgaggcca

SEQ ID NO: 4334 - DNA, 661 bp, Homo sapiens
  misc_feature [331]..[331]: Chromosome 11, SNP identification no. = rs7110581
  misc_feature [331]..[331]: allele = a, in linkage disequilibrium with rs10502270, respectively
  misc_feature [331]..[331]: n is a, t, c or g
gtcttcttcttccttctccttattttttattcctggaggtggggatctcagtttttgttaactcattctttcttttgtataaggctagccagccccagtaatgaccaaaatatactcaattaggtatcttgtttaaatgagaatcctgtttaatgggtagagtaaaattataccaccccactgaactcatttatatgttttgattagataatccttttgtcataatattgagctaactttcacctattttgtaatatttgaatatttaaatatagttgctagatcatatatcttgatgtagttcaggtccaggagtttcaacagaaaagancttacagcccattcataattagagcgtttataaacatatttggaaattgaggtagtccctgaatgaagtgacttataggaaagcactctggaagctgagagaaaaatcatatgtgagaaatctggtaaggtaggtgatatggtttggatttgtgtccccacccaaatctcatgttgaattgtaattcccagtgttgaaggaggggcctggtgggaggtgattgaatcatgggggtggacttccccggtgctgttcttgtgatagtgagtgagttctcatgagatatggttgtttaaaagtgtgaagcaccggccaggcatggtggctcac

SEQ ID NO: 4335 - DNA, 661 bp, Homo sapiens
  misc_feature [331]..[331]: Chromosome 11, SNP identification no. = rs7130648
  misc_feature [331]..[331]: allele = c, in linkage disequilibrium with rs10502270, respectively
  misc_feature [331]..[331]: n is a, t, c or g
ctgttttcagtaatcacaaaagtcaccctttgcttcatcccttctccctttattgtgcacctattatatgttatacaatgtgtttgagcagatgcaaaaaataagactaatttactaacttaatctaataaaggggcacagatacaaataatcacaacaaaacacaaatgtagggtatatgcaaatgcaaattgggatgtggcaacaaaaaataaataacaatgcgaggtagaaataaatctaaagttattcaagcctaacctcctcattatacagatgagactactgggagtattttagtcaatgttgtacagtgatttaggggcttagnctggataaaatccagtttcctggagccttccagagctctctctaaaatatgtctgtcatacctgttgttgcagtgcctccctatagggctatactcataggatacaaagtcattattggccatccaattcagtcacatacttattggtattgacttcccagtgaagttgaacctaaaaggaatcactcagtaaaaaattaaaatcagttgtttctaggtgagagggcttttatataccttttcaattttgcaattatttctattacaatcttgcattatttttatttttattttttatttttttgagacagaattttgctcttgtcactc

SEQ ID NO: 4336 - DNA, 661 bp, Homo sapiens
  misc_feature [331]..[331]: Chromosome 11, SNP identification no. = rs10790598
  misc_feature [331]..[331]: allele = a, in linkage disequilibrium with rs10502270, respectively
  misc_feature [331]..[331]: n is a, t, c or g
aaaatgtataaaactaggctgtgccccaaccacattgggcacatgttcatcctgggcacatgttcttcttgcgctgtgttaccggacattggtcaatcatatttggctcagaatacatctcttcaaatattttgcagagtttgactcttttcattgacagtgtgcttaaaatttaaataactaatattttactatagctattattttgtatcttgcctttttttaactcagcaatatattttgatgatttattccggttgacacctaaaaacctaattcatttatattaactattgtataacattccacgtaggtataaactagagttggntcactcaattcctgatgaacagatgaattgtttttaattttttagtattacaactcacattataaaaaaaattattatacttattttcttgtccatgtgtgcagagtgtgtctataggtaaaacttgcttggtcttgggtattaacttttccctgattactactgagttccacatcttttcataatttttttgtctttattttgttctataaaattagcatattttctattagattatttgaccattaaaaaattaattattaacagccgggtggggtggctcatgcctgtaatcccaacaatttgggagggtgaggcaggtggattact

SEQ ID NO: 4337 - DNA, 661 bp, Homo sapiens
  misc_feature [331]..[331]: Chromosome 11, SNP identification no. = rs1939915
  misc_feature [331]..[331]: allele = t, in linkage disequilibrium with rs10502270, respectively
  misc_feature [331]..[331]: n is a, t, c or g
taaaaaattatcactatgggaaaaaaaaatggtattgcgagctttctattttgctatactttgggtcaaatgtacgtctctgagaagaactgaatacgtagcatctctctcctttgtggagcctcttaacttctgaaaagaacatggcctttttaaggttatctcagggccctgaggacctcatcatatctaggaaggaaggctctgggctctctggactgtaaagacctgtgtgtaacaatttaggctttcatttttgggggcatttgttccctcattaacatttctgtggatccttagaaaattgcgtaaaattgcacatttaaagatncaagaattagtcaggaaaatgtggcataataggaaaaagtgtagcaggttttagaatcaatgatatgctatatttttagtttaatcacttgtagctttatgatcttttaataggatgcttaagcatcctgagttttatcttcctcatctctaaaatggcaaaagtagtaataccagattcaaggtcctaagacagtgcctaccacagtgatttatacctagtaggtgctcactaaatgtttcttaagaacatagggttgggaaagggtgaacagaaatgaaataagatgtgatgcaggttggggattagatgtaacttaagttctttact

SEQ ID NO: 4338 - DNA, 661 bp, Homo sapiens
  misc_feature [331]..[331]: Chromosome 12, SNP identification no. = rs12822216
  misc_feature [331]..[331]: allele = g, t
  misc_feature [331]..[331]: n is a, t, c or g
cttcttatagatttctatatggcaggagctgtgctaggtgctagggatacagacatgaaaagccatttttatgcctttaaggtctacacaaacttttagctgggtggagacatcaaaagacaaatgcgagacagtgtgacgtttgcaatatggaggcctatgcacgttgcaatggatgcagctagtggtgtctagggagtcccagatgaggaacaactcgagccaacttttaagtaggtgaagttttctggtaaataagtagagaaaggtcaagggtgccttctaggcaaagagaacaatttgcaaaggcagagaagcacaacatagcagnacccgtccaatggagacccaagttcagtgcattcacatagtcaagagccctttggcattgccagctccatccatgccagatgaggcacaggtgctggcattaaaaggaccagcaggggacggcatctttggtaggcaacattaaggccagtggagactttagtccctagaagtggttgcattttggccacaccaaaatggagtcctgtctaaagaatctgttaagggcttttgggaagagtgcatgaaaaaactgaaccctcccatagcttcttatcaaaataagatgtccactgctaagcttttgctacttaggggcacttttatgttt

SEQ ID NO: 4339 - DNA, 661 bp, Homo sapiens
  misc_feature [331]..[331]: Chromosome 12, SNP identification no. = rs7966465
  misc_feature [331]..[331]: allele = t, in linkage disequilibrium with rs12822216, respectively
  misc_feature [331]..[331]: n is a, t, c or g
ggtgacaagaaggctttttctctgtataccatactttaggggtgattataagactactaagatgggtagtaaagggtcatctcctatctctttctccaagcagcatgtcaaatagaaggcttattaaacaaaggccacatccatccgtatccctgcgtcctagttgggcacggacacaacccaaggctgcgtcctttcctgggctgttgaaggaaacagcctcaggaaactcaggtgccatgtagaagactataccattcatcttccaaaacactgatttaggcagtgattattcccttttattcatacacatttcccaatttcatgaagngcctgatcatgggaatagggctggcctttttttttaaaattttttttgagatggggtcttgctttattgctgaggctggactgaagtggcatgatcatagctcactgcagcctcaaaatcctgggttcaagggatcttcctgcttcaccctccttagcagctagaactacagacatgtgccaccatgcccagctaattaaaaaaaaatttatggagactgcatcttgctatgtttcaaactccaggcttgtctcaaactcctggcctcaagaaaccttccttcctcagtctcccaagtagccaggactacaggtgcaagccactgtacct

SEQ ID NO: 4340 - DNA, 661 bp, Homo sapiens
  misc_feature [331]..[331]: Chromosome 12, SNP identification no. = rs1116723
  misc_feature [331]..[331]: allele = c, in linkage disequilibrium with rs12822216, respectively
  misc_feature [331]..[331]: n is a, t, c or g
acctgcagctggaagcagagtaggaagccgaacccagcctgggttgcctaatcctcaaccaacttccagatgatttagtgggaaaataaatgactcttgttttaagccactggtttgggggtagtttgttactcagcaatagcccgcctttgcagtatgccaggtgatggtaagtcccaagaggagaatacaaaatggaaaggcagaatgagaactattctgtgggggcacaatttagttaggatgatgacagaaggccttgctgatgaggaaataaccttctagtaagatctgaaggaaatgagggagcaaaacactcagattcctggangaagagcattctgataagagggaaaagcaaatgagaggcattgaggcattgaggaaagcatcctgcatgtttgcacacagcaaagaagtcagagaggctggagtgaggccagcaaggggcgcagtggtaggaggtaatgtcagggagacaaaggacaacttacatagggccttttaggtcccacaggtagattttaagcagaggagggtcacagtctgacttaatttggaaaggatcactctatctgctttgctgtgaataggatgtagggtggaagcaggagaattgggtgggagcctattacaataacccaagctataaaggatggtg

SEQ ID NO: 4341 - DNA, 661 bp, Homo sapiens
  EPLIN
  misc_feature [331]..[331]: Chromosome 12, SNP identification no. = rs11169335
  misc_feature [331]..[331]: allele = g, in linkage disequilibrium with rs7136702, respectively
  misc_feature [331]..[331]: n is a, t, c or g
aatgttacagagaagcgaaagaagaggaagttaaccaggctgacttgaaggtcaatttttttcttattgaaggaagaatagtcacagaaaactaaatatgaacgctctttgttttttttttttaagataggttctcactctgtcacccaggctggaaggcagtggtgcaatcatagttcactgcagccttgagcttctggactcaagtgatcctctctacccggcctcctcctgtttcctggaactaggaatgggtaaagttataacaaaaacaggagaagctgtgataaggtagaggcatgctggcagggggttaggttagggatcttcntgctgtgatcatcaattctaccatcttggtgtatgaccttcagtcataattgctaatcctcaagctcctaatctgtcaaaggaatagggcaaatgctagccagaccagtggtttcaagctctgctagctgcagaaccctctcttcaaatgctgtcttacgcagaacctaacctttacaagggatcaaagcaggattgctggaatggaaaatctaaagagctgggcctgggatctgggactgggatctgggcctgggatctgggcttgggtttagcccttagggtgttccagttgttggagaactggccctgagattcctctgaagacttc

SEQ ID NO: 4342 - DNA, 661 bp, Homo sapiens
  EPLIN
  misc_feature [331]..[331]: Chromosome 12, SNP identification no. = rs12828340
  misc_feature [331]..[331]: allele = c, in linkage disequilibrium with rs7136702, respectively
  misc_feature [331]..[331]: n is a, t, c or g
aaagtactcttctatacatataaacacaaaatgcactgttaacaattagaaagtaaagctgacttatctacaaacatcagctagattaagcttcctccaaacaacaatttcatattaatctctgatcagagacctcctaagttttcctactgtttttagctaggcttgtataggactcactatttgcaaaccccataaatataaagccactaggtgttggaaacagacattagtatatgctttgtggaaaatagtcctgtagtctacagccataccaccctcaacgcgcctgatctcaactgatctcggaaaatagtcctgcagtcttctntgggaagctgcagtgagtgaaccttacaaaccttaagtaatattagcaacgtgtttccactgagtataaaacctagaacagaaatccaggctgattccctggttttcactcctttcagtatataccaccacctgtcctacttctatgcctttacctcctgttgctccccttcctctggaatgtcttcagcattctccaagcctaccaaataactctattcatctttccaaaccagttccatgtgttaagcacatcagaagaaaaatatgtgacaggaacaaactcaaatattaacttcagcaggttacttcctttacctcagttttctca

SEQ ID NO: 4343 - DNA, 661 bp, Homo sapiens
  EPLIN
  misc_feature [331]..[331]: Chromosome 12, SNP identification no. = rs7979830
  misc_feature [331]..[331]: allele = t, in linkage disequilibrium with rs7136702, respectively
  misc_feature [331]..[331]: n is a, t, c or g
ccagatgacagcatcaaccgcctgacttgtgagtgagccagccttttgatgattacagctcccagcctttgggccaccctggctgatgctaagtagagcagagatcctgcccaaactggagcttcaaaagcaaaataaatgctggaattattattattattattattattattattattatttaagacagagtctcgctctgttgcccaggctgtagtgcagtggcacgatttcagcttactgcaacctccgcctcctgggttcaagcaattctcctgcctcagcctcctgagcagctgggactacagtacaggcatgtgccaccatgctngactaatatttgtatttttagtagagacagggtttcaccatgttggccaggctgatcttgaactcctgacctcaagtgatccacccacctcggcctcccaaagtgctgggatcacaggcatgagccaccgcgcctgaccggatgtgttctaatgaagttttatttactaatcagcagccagtgggctgtagtgtgcctgtgtaggttacacttttcagcagaacttcgtgcaatgatgaaatgtttctgtgctgttcaatacgacagtcaccaacaagtagttactgagcacttgaaaagtgataaatgcagctggtaaacatttaaaac

SEQ ID NO: 4344 - DNA, 661 bp, Homo sapiens
  EPLIN
  misc_feature [331]..[331]: Chromosome 12, SNP identification no. = rs7132551
  misc_feature [331]..[331]: allele = a, in linkage disequilibrium with rs7136702, respectively
  misc_feature [331]..[331]: n is a, t, c or g
ggagtttgggccatatttcaatagtgggaagaagtaacccatgagtgatcagagattaggtctaatcttatgtgctatttacttagcacatgcatggtttttataacaaaaaaagtttctgatcctcaatatccacacctgtaagataagatctctgtagtggattaaccacagtctctctggtggaacacagaaagtttctgaaaaagcatgtaacatgactaacatcatattttaaaatattattcagcagtagtgtgcaacttgctaagagggaaaaagactggagtctaaattactagtcaagaagatcctgaaactaagtgagagntaatcaaggtttaaattcgtaaattaattagggtaggtggaaatggaaaagtgggaagagagaaattgacagttcttagaataaaatgaacttagggtaaaagagaatcaaagctggcatcatcaaacccgaatgatggaaggctgttgattccattaacagagacagtaaatatagaaagaagagggaaaatgatgagtgttgatttacacatgttgagacatacatgtcagcaagagaaatccaaatgatatacaataggaaactacaaattcaaagctaaagttagaaatccgactcttggaagattttaagacactaactttatgc

SEQ ID NO: 4345 - DNA, 661 bp, Homo sapiens
  EPLIN
  misc_feature [331]..[331]: Chromosome 12, SNP identification no. = rs7953953
  misc_feature [331]..[331]: allele = t, in linkage disequilibrium with rs7136702, respectively
  misc_feature [331]..[331]: n is a, t, c or g
aaggctgttgattccattaacagagacagtaaatatagaaagaagagggaaaatgatgagtgttgatttacacatgttgagacatacatgtcagcaagagaaatccaaatgatatacaataggaaactacaaattcaaagctaaagttagaaatccgactcttggaagattttaagacactaactttatgctttgcatatatctcaatcctcacaatcattctacaggattggttttattgtcttatatttatggtaacgaaattgagattcagacatattaactttacaaagatcacttagctataaagtagcagagctgggattcaaangcatattctgtttgattccaaagtccattttctttcaactacaattaatgaagaatgattaaaaccgccacttttagccaatgtagaaaaccagctagaaaaatccctgaaccacctagctgaaaacccatacaaattatttttcagtaagagaatagtggtgagtatcttcccagagtggtgaatatcagagataatcattcctgctttcagggaaacttaaaagttatcctgggctcacttggaataccctccattgtagtaactggctttcattggcctgcattaaaggtgtggtattggggccagcatggtggctcacgcctgtaa

SEQ ID NO: 4346 - DNA, 661 bp, Homo sapiens
  EPLIN
  misc_feature [331]..[331]: Chromosome 12, SNP identification no. = rs7486747
  misc_feature [331]..[331]: allele = a, in linkage disequilibrium with rs7136702, respectively
  misc_feature [331]..[331]: n is a, t, c or g
agcaaaactaagaaatgagcactggtacaatactattaactatagactttattgaaattccaccagttttttaattaacgtcttatttctgtttcaggatcatacactgcatttagttgtcgtgtcttcctaagtctaccccaatctatgacagttactctgcttttccttgtctttcatgacctcgatattgttgaaagtattggtcagatattatgtagaatgttcctcaatttgggtttcttggtttctccaataaaatagaatcaagactccttggagaagcggttgattccagagctggggaagggcaaatacaagatcagcctgnaacatcttgcaatactcaaaagacaaaacaaaaaaaagtttttttaaaaaacatgatattttctcagattagattgagattataaatgtttgaaaggaataatccagagttgatgttcccttcacagtgcatcatatcagagggtacgtgatgttgatgtgatgtcttattactcacgacattagccttgatcacatggttaatgtggtatatcaggtttctcctctgtaaagttattatttgttttccctttgtaattcataaatattatgagggagaactttgactctgtttctccttaaactttttcccattaattttagcattcat

SEQ ID NO: 4347 - DNA, 661 bp, Homo sapiens
  EPLIN
  misc_feature [331]..[331]: Chromosome 12, SNP identification no. = rs10783344
  misc_feature [331]..[331]: allele = c, in linkage disequilibrium with rs7136702, respectively
  misc_feature [331]..[331]: n is a, t, c or g
ttttgtatttttagtagagacagggtttcaccatgttggccaggatggtctcgatctcttgacctcgtgatctgcccacctcggccccccaaagtgctgggattacaggtgtgagtcaccgcgcccagccctataaaaattttataaactataaattcatactgatatttctgactccagtctagcatcacaaggttcattctagtattccctcttggcttatttataacttctttctctgatagtaaaaagcctaaccccacagaactttgatttctgaaaacagatctagaatctctaaaattatgccataaccagcttctcctcccangatacaccgtatatttttttcactccatttgaaatgttatcccgtactcaacctattcaccttaaaagactcaagtgaaagaacacacatggcccttttccaaactgccctagccctattcctaatcagcataagtcaatccccctgccttataataatttcataattcctactcaatagcaagatatttgaagtcagaagacagatctactttgtcttttaaccttctgacatctagtatttaatacattgctttctaaatagaaagaactctataaatacgccttccataaaattacacatagctttaagttttatctgaaacacaat

SEQ ID NO: 4348 - DNA, 661 bp, Homo sapiens
  EPLIN
  misc_feature [331]..[331]: Chromosome 12, SNP identification no. = rs6580735
  misc_feature [331]..[331]: allele = c, in linkage disequilibrium with rs7136702, respectively
  misc_feature [331]..[331]: n is a, t, c or g
actgactttgggccaggtgctgtggcttacgcctgtaatcccagcactttgggaggctaaggtgggaggatcacttgagcccaggagtttgaggctgcagtgagccgtgactatgccactgcactccagcctcggcgacagggcaagactctatcttgaaaaacaaaaacaactgactttggtctaaaatttgtaggtcatgaagaaccacccaagaactttcctaatcttttttttttccctttaaattaaaaaattaccagatcaaattcaagtctaactccacctctctcccaattaataaaatttgttatttgctcatttggttctntccctccccgtcccagctgatcattaacttattctaagggcaaacataatccaacgaagtgaggttttcttatttttccagtagttttttttcacacatagtaagaaaaatctctttcagtaagtagaaaaacagatcattaagtcactagcttcaaatttaaggtaaagagtagagaaaaacatagctaattagaaaaagaatgtggaaatttacaattgaccaagaccatcacgacaaagcacagacttcctctgaacagcatatttctcctttaacctttgtacctttccatactttaacatcagatgtactgaataccagtgcctg

SEQ ID NO: 4349 - DNA, 661 bp, Homo sapiens
  EPLIN
  misc_feature [331]..[331]: Chromosome 12, SNP identification no. = rs11169348
  misc_feature [331]..[331]: allele = t, in linkage disequilibrium with rs7136702, respectively
  misc_feature [331]..[331]: n is a, t, c or g
tactgaattgccacacatctcagcaaaggcccacctacataactgaaaatctgccgagaaactacatgctcataagtcttgccaattacatgcttaattaaggcaaaatagttcattaaggagccttctttacaatctcaaagcaaaagaaacacatacgcttattttaggaaggctccttctgttaaagatataaccttcttaaagcagccctttgtccttaataactaatcaagttttctccaaatacagggcttcttagtttcacttctggacatttccaggaagggcctggcttccattcttatctgaaattttagatgatgtgctntttttcaggacttgctcaatctgaagagtcagttcagatcagtttaaccaataccttcaagcaggagaattaaaatggatttactaaaaagtgactcttctctaggcaagttctttaatccttcctttctttaaaagagaagctggccgggcacggtggctcattcctataatcccagcactttgggagaccgaggcgggcggatcacctgaggtcgggagttcgagatcagcctgaccaacatggagaaacgccgtctgtaccaaaaatacaaaaaaattagccaggcatggtggtgcatgcctgtaattccagctactcgggaggctg

SEQ ID NO: 4350 - DNA, 661 bp, Homo sapiens
  EPLIN
  misc_feature [331]..[331]: Chromosome 12, SNP identification no. = rs2111988
  misc_feature [331]..[331]: allele = t, in linkage disequilibrium with rs7136702, respectively
  misc_feature [331]..[331]: n is a, t, c or g
aataaaaaatttagctgggtgtggtggcaggtgcctggagtcccagctacttgggaggctgaagcaggagactcttgaacctgggagttggaggttgcagtgagtcaagatcgtgccattccactccaccctgggtgacagagtgaggctccatctcaaaaaaaaaaaagacagacatggtctctactctcatgaaatttccattccactggagaagccggacaattaaagactgtgattagtggtgtgaaggaaatacaaaaagagtaactggagttgtggtaggaacagggacacgaacagcttctttaggcagtgatcagggaaggcntcattgagtgaatgacatttgaactgaaacctgaatgatggggagaacatatgcagccagcaaggtgaagacaatagatgggggagttttccaggtagaggaaagcaaatgcaaaggccctgaggaaggaataatacagctaggaagtaagtgagaagcatgcgatgacacagagatgagtagtagtcagattaaatacggattaataacaatgctaaaggattttaattttattctatgtgtgatacaaagccaaacattattatataaaagtgtgtttgcaagatcagatatatttcatgtactaaatgagtactttggccaggtgcg

SEQ ID NO: 4351 - DNA, 661 bp, Homo sapiens
  EPLIN
  misc_feature [331]..[331]: Chromosome 12, SNP identification no. = rs11169350
  misc_feature [331]..[331]: allele = c, in linkage disequilibrium with rs7136702, respectively
  misc_feature [331]..[331]: n is a, t, c or g
ccattcaattttttttttatacttctattttcctgaaagttaaagggcacaaacaaattaagctgtccccaggctccccttgctactccggtggacactgcctttactgcatccagtctttcctcaggctctatatatctaaaattaggtgaaaggttagagatgagacagaaagtaattccagaatgtctagtgaacagtagtagctccaaaggcatcctttcagcacagaggttgtccagtcttggggatcaaaagcccaaccctctcattttacagatgaggctctgagtcaatgaatcaatgacttgtccaagatcacctgattggntgatgacaacattaagttgggaatcctgactctcaaatagcaccctttccattctgcagtactgcttcattgatcacaagctctggcccctcaaaacaatgggcatttataacaccacaattccaacttctgtatactttccactttgtcactccattcactctatttggtctaataaaagcctgtgcttcccccacaaaacgctccaaataaaagaataccaaacaaaaaaccaacataattaaaatgttaacgcccaaataaaaatgggagtgggattaacccagacataattcacagaagaaacagaaatgaatgtatgaaaaatgt

SEQ ID NO: 4352 - DNA, 661 bp, Homo sapiens
  EPLIN
  misc_feature [331]..[331]: Chromosome 12, SNP identification no. = rs10876014
  misc_feature [331]..[331]: allele = t, in linkage disequilibrium with rs7136702, respectively
  misc_feature [331]..[331]: n is a, t, c or g
aaaagaggtcttcagtagcacaataatttgactgagtcttgaggactctgcacccagcttcagaataaactcatcagtatggtcctaccttatcatccaccatagactctcaactccataatcattaagtagaaactacttcatttacaaccactggtttgttagtaacctgaagaggctgtgttaagtaacctcacctggagattactgtatgcaatctaaaatgaagtaccttaagtttctatcaaaaaacatacagtgaaagacaatagcaaacttaaaaaacaattgccttttctaatggaaattactaacttaggactcgttatanattttcctatctgcagaaagggtacaattctaatctaaaagtcatctatctaatagtgtatggaattaagaatgcctgaaactagtttcactgtcaatttaaataataaattcttccaatttgtggttaggtgccctattatgccaaagatgtctaatgaactcccacactctcaatattcttttgtgtctgtgtgtgtgtctttgataaatttttttggtacgagggctctaagttaattgcagttaactggtgaaaaataccagagaaaatataagaatttgaaacctgaagaaacactagtcaaaattatacttaaaaacatttttc

SEQ ID NO: 4353 - DNA, 661 bp, Homo sapiens
  EPLIN
  misc_feature [331]..[331]: Chromosome 12, SNP identification no. = rs10876015
  misc_feature [331]..[331]: allele = c, in linkage disequilibrium with rs7136702, respectively
  misc_feature [331]..[331]: n is a, t, c or g
ccggttgtggagagagaaggcccttacctggctaaaagccgcctttcctctgcgctgctaccagccctgtcacaggtcccggcgctctacctagcgcacctgtcgcgaccaagctgctaacacctactgctcctgcggccccgccccggaccccgcccaccgccgcgggggcgcgcacgccagacagcctcccgtgcggcctcgggctgagcgtgcgcgccaccggctacgtgcccagcgctcgcgtctgctccagtcgctctggcggtgcggggcgctggcgacgggacagggtttttgctgcccggggcctagtctacctcggcacgcntttctctgaaggagacacgcacttgcacgacgtgggcctctgtgcagctctactttgtccttaactcctctgactcaacgttatcgcagtttgactctggagccactcaggtttttcctaagctcaactctagccagctaggttcctggtgctttgggggtaagttgtgtgcagggagggtgttttacaggaggctgtgtggtgtagtggaaaaagctgaattaagtacattaatcctgaaaacggtttgacaagggcagatgacgtccaagttctccaacagctgtttttactcctccattcagaataggagctgtgctaatggtttgg

SEQ ID NO: 4354 - DNA, 661 bp, Homo sapiens
  misc_feature [331]..[331]: Chromosome 12, SNP identification no. = rs6580736
  misc_feature [331]..[331]: allele = c, in linkage disequilibrium with rs7136702, respectively
  misc_feature [331]..[331]: n is a, t, c or g
caggtcataagcacaaccattattagaaatcaaattatataagctacaattaaattatcttaaaaataaaagtaataggccaggcatgttgagtcacatttgtaatcccagtgctttgggaggctaaggcgggaagatggcttgaggctagaagtttgatgttgcagtgagctatgatcacaccactgcactccagcctgggcaacagagtgagaccctatttctaaaaaaaaatttttaaatataataaatattaaaaactcatcactttgtagtttttttcttcattttactaataattctgctcttgaggttatttgtccattgtatnccctgtggaaatactacatatgttgtatgcatctcttcccaactctattcagaaatgtcacattggtagcacgaaattggctgtaaggggagtatttacaccatggaaatgggcaaatgcagcaagtcagggcgtgatttattgttttgttgatttttctagaccatatgttagcaaaccttttgtgtaaacagccaaatagtaaatattttaggctttgtgggacttatagtctctgtcacagctactcagctctcactgtagtgccaaatgtgccaaagtagccatagacaatacttaaagaatgggcatgggccaggtgcagtggct

SEQ ID NO: 4355 - DNA, 661 bp, Homo sapiens
  misc_feature [331]..[331]: Chromosome 12, SNP identification no. = rs10876017
  misc_feature [331]..[331]: allele = t, in linkage disequilibrium with rs7136702, respectively
  misc_feature [331]..[331]: n is a, t, c or g
ctggatagtctgggcacggtggctcatgcctgtaattccagcactttagaaggccgaggcaggcggataacttgaggtcaggaattcagaactggcttggctaacatggtgaaagcctgtctctactaaaaatacaaaaattcactgggcgtggtggtgcacgccagtagtcacagctactcgggaggctgaggcaggagaatcacttgaacccaggaggcggaagttgcagtggactgagattgtgccactgcaccccagcctgagacagagtgagactccgtctcaagaaaaaataacaatattatggataaaatttattctgtttacnaccaacccaaaaaaaggaaacagttggaaattatagctaaataacttgaaactgaaattattaaaattagccaagtacttaggttgagatgggtggacatgtactttaccaaccgctaatgctgcatggcacacatatcctacattataaatgcatttttctcattctttttattctggcctagcaacaagatcagctaatattaatttcttgtaataccttactttaatgattgatattcttaaataattttcattactttcagttgcactgcagttaagatcaaccaacattcagaaaattaaaaaattaatagaatgcactataaaa

SEQ ID NO: 4356 - DNA, 661 bp, Homo sapiens
  misc_feature [331]..[331]: Chromosome 12, SNP identification no. = rs7311973
  misc_feature [331]..[331]: allele = c, in linkage disequilibrium with rs7136702, respectively
  misc_feature [331]..[331]: n is a, t, c or g
tcattcctaattgacttttggggattcaataaaatggcatgtcttacttagctgacaaactaggagcttagatttctgttcctccttcttcttttagtatataaaggtgtaattcattaagcatttggtaaaatgaaacttctgccatgtccttaggaataaaccaaagaaaaatgttccaaaattatttatagttaataatctcatatattgttatttatctagatctagtctacttactgccaaacttttttttcatttcagtttatagttatagttgatcaatcagatgtcttttttttggtaaatattcttgttttttattttgttnttattcctggcaagctatgatagataggtaaacattcttttttttttgagacagagtctcactttgttacgcaggctggagtgcagtggcacaatctcggctcagtgcaacctccgcctcccaggttcaagggattctcatgcctcagcctcccaagtagctgggattacaggtgtgcaccacaacgcctggctaattttttttgtaaagacggggttttggccattcgcagtggctcacacctgtaatcccagcactttgggaggccaaggtgggtggatcacctgaggttgggagttcaagaccagcctgaccaacatggagaaaccc

SEQ ID NO: 4357 - DNA, 661 bp, Homo sapiens
  misc_feature [331]..[331]: Chromosome 12, SNP identification no. = rs11169357
  misc_feature [331]..[331]: allele = g, in linkage disequilibrium with rs7136702, respectively
  misc_feature [331]..[331]: n is a, t, c or g
caggtgtggtggctcatgcctataagcccagcactttggaaggctgaggtgggcagatcacttgaggccaggtatttgagaccagcctggccaacatggtgaaacctcatctctactaaaaatacaaaaaaaatagctgggtgtggtggcacgtgcctgtaatcccagctactcgggaggctgaggcaagagaatcgctgggacctgggaggcggaagttgcggtgagccgggatcgctccagtgcactccagcctgggtgatggagggagaccgtctcaaaagaaaagaacagaaatatttgtctaacccaaggccccagagattttctnctatgttttatagatttagaagttttatagttttagctctaacctatagttaagggtcagagtttttccatgtgaatatccagttgttccagcactattattgaaaagtctatcttttcccccattgaattacattggctgctttgttgaaagttaaataaatatatttgtgtgggtccatttttggaaattctgttctattccattttactatatgtctatgataatctttttaataaagaaaactattttactttggtgaaaagaactctgaagttatttttaggtattatgaaaaaaggctgaatcttttttttttttttttttttt

SEQ ID NO: 4358 - DNA, 661 bp, Homo sapiens
  misc_feature [331]..[331]: Chromosome 12, SNP identification no. = rs6580738
  misc_feature [331]..[331]: allele = t, in linkage disequilibrium with rs7136702, respectively
  misc_feature [331]..[331]: n is a, t, c or g
aaggactaaagaataatagttttctaggatatatcttagagttaaccaatttgggtttattttatttgatgcatggtttgctcttccagtatgtagagtcatgtcttctcccacctccacccaaagtgttaattgaattatagttgtaaatattaattctattccattacttttgttttcttcttcatggcatccagaaatacatatgttggatctggtttgattattttatcactttgttttcaatctttttaatctttttaatttttcttggcctttcttatttccacactctatatctcacattatatatttggtccttactattctntttgttgattgaggtcacattctctgggacgcagattctaagacagagacatgtacacatttggaatcgacagttgtgacaaagtgaaaggaggaggattggacaagagtaacagctgaactgtaatcagtgatgtgctagtaaatagttaacaactggctcttgggggaggaaagctttgatttgtaacatttgacaatttccagtgtataaatatgtctttcttttttttgagatggagtttcactcttttgcccaggctagagtgaagtggcgtgatcttggctcactgcaacctctgccccccacgttcaagagattctctggcct

SEQ ID NO: 4359 - DNA, 661 bp, Homo sapiens
  LOC121006
  misc_feature [331]..[331]: Chromosome 12, SNP identification no. = rs7489214
  misc_feature [331]..[331]: allele = a, in linkage disequilibrium with rs7136702, respectively
  misc_feature [331]..[331]: n is a, t, c or g
gccaccacacctggcctaacactacttcttacgtgaggacttagatttcaccaaaataaatcagactgctcctgtgaactcttgcagattaacaaaagttcgattttctaaattcttgatttagaatattaaataattatctgtcctgaaagagttaatgcagactctaaagcccttatttcctctggaataatttctagtggtttaagtgagaatctggttcaacagattttggaaatgtggagtcatctcttcagtgtatcctaggaagtaaacacctaatttactcaatttgggtctagatatgataattgcacttaagctcatgtcnctgaatcataatatggagaaaagcattctacaatggtctttctggtacttctattaacaaatccccaaggatggaattaaaagtggacctatctagtgttagattagattcatggtattataactggttttttgtttgttttacattattcagtggtgacatctataggcctatgattagaaacactaacagactaatgctgaatttacctgtactattttatgactggtgtgagtctaacctcataccaaacattacttttggttgatgtacctggtgctacaggagaaagtcaagttagggaaccaaaaggtatatgatcaaaggccc

SEQ ID NO: 4360 - DNA, 661 bp, Homo sapiens
  LOC121006
  misc_feature [331]..[331]: Chromosome 12, SNP identification no. = rs7310541
  misc_feature [331]..[331]: allele = c, in linkage disequilibrium with rs7136702, respectively
  misc_feature [331]..[331]: n is a, t, c or g
accatgaaaagagacagaatctttagaagggtcttcagagctggccctagactaaactgtgactcctccttttccatggatttgcaaatcctctccctactccacccacctccaacatgcatcattttagaggtggcagctctgctacataaaaacctttgtcctacttaagcttaagtcctggtcctcttattttcttgctgtgagactttgggatagttgcttaatttatctgcacttctttctcctcatttctaaaacagggataataacacagggttgtgagaattgtaaaacacagtatatatggaagcactttataaattgtgangcagtatgcaactgtaatgatagccagcatttactaaatacttagtgaatgtcagacactgaactaagcattttccatatattagctgatttggtatttataacaaccttatgcggtatgtcttataattacccttgtcttacagcaggaaaatctgaggctcagaaaatgtaagcggcttgcataaagtcacttagctagtatgtagctagcctgatttgaacccagacaatctggtagcggagctagccatcttgaccaccatgctgattcagtgcaaagtattcattcatatctaacctcttatcccttttgctttttttgtctcct

SEQ ID NO: 4361 - DNA, 661 bp, Homo sapiens
  LOC121006
  misc_feature [331]..[331]: Chromosome 12, SNP identification no. = rs7134595
  misc_feature [331]..[331]: allele = t, in linkage disequilibrium with rs7136702, respectively
  misc_feature [331]..[331]: n is a, t, c or g
ccataattgataaatggtagatttgggaagcaagcccagaacttctttcttccacaatgccaatatttctcaaggtgcggactctgatcacctagactgaaccatatggggtagacgggtggggtgcttgttgaaaatgcaggttccaaggtccttctccataccttttgaatcaaaatcttagtggtaggcttcaggaatctgcattttaaaatctcaggtaactcttactttactaaagtttgaaaaccattgtgcttacggacagaacagggaagaaggggatgaggaagtccaggtggagaaatcccataaacaaaggtaagaaaangaaagttatattttgagagtgatgagtagtctggggtttttgaccacagatatgtgaaaggatatagtgggggatgagactggaatggttggatagtgaaagatgaaaggctttcaaaggtatgttaaggagtttggatcttctcttatttttttttttggtagatgatggggacccatcaaagacatttttctaaatatatgtattttatatacatgcgtatatatatatattgcctcaggtgaatcagtgagatttacctgagattttatttatccatctctatctatattgagagagaagagagaaagaataattcttagctcttag

SEQ ID NO: 4362 - DNA, 661 bp, Homo sapiens
  LOC121006
  misc_feature [331]..[331]: Chromosome 12, SNP identification no. = rs4768951
  misc_feature [331]..[331]: allele = c, in linkage disequilibrium with rs7136702, respectively
  misc_feature [331]..[331]: n is a, t, c or g
cccaggagatctaaactgcagtgagccatcattgccctggacaagagagtgagaccatgtcaaaaaacaaaacaaggccgagcgcggtggctcacgcctgtaatcccagcactgtgtgaggcgaaggcgggtagatcacctgaagtcaggagttcgagaccagcctgaccaatatgatgaaattctgtctttactaaaaatacaaaaattagccaggggtgggcaacaagagcaaaacttcgtctaaaaaacaaaacaaaacaaaaaacaaaaacaaaacaccaccaccaccataaaaacaagaaatcttcaaactactttccacagtggntgagctaatttacattctcattaacagcgtataagcattccttttctctgcagccttgctaacatctgttagcaaggctgaggcaggagaatggcttgaactcaggaggcagaggttgcagtgaggtgagatcgtgccactgccctccaacctgggcaacagagcaaaaactctgtctctaatacataaataaaaacaaaaaaagaaacagaatggtatttcctaggttttcttctaggatttgtatagtttgaggtcttacatttaaatctttaatccatctcgagttaatttttgtatatggtgaaaggtagggatgcaatttcattc

SEQ ID NO: 4363 - DNA, 661 bp, Homo sapiens
  LOC121006
  misc_feature [331]..[331]: Chromosome 12, SNP identification no. = rs7296291
  misc_feature [331]..[331]: allele = g, in linkage disequilibrium with rs7136702, respectively
  misc_feature [331]..[331]: n is a, t, c or g
caaaaatgatgaaagaaattcagaataactggaaacttttgaaattgatgttttggagaccaaccatgatccacaaaatatacttggcatctccgctggagatatatatggatgaaatggatcacgttatatgtcatttcttattttccaaaaaatatatctccttttgctatcttaaacaagcttccttcccatagaccttatataaggcagtcctttagaacatatggcctgacaaatatgaatatacttctgggacaatgacagaaaatatttgcaatcagaactaaaccagaaaactagacgtaaataattatatctacctggcatnctggatcagcctataggcaatgtacttgcggaataagtatcccaactgaactgtgtccatatgaagtatctcaattatgagagtcctagccattgtgtgtagctgtgaagggagtccacaagtttttatagcctgatttaatagtatcaggttcttcttctgagcctccacatcaacaaaatacctcttttcttcaagttcttgaggagaggaagggggcaccattactttgggtttcttggtatctgaaactgaactcagtatccagggcttgtctataggagggaatcgggatttctggtaccattccaaaggtgaaatctgtgatgt

SEQ ID NO: 4364 - DNA, 661 bp, Homo sapiens
  LOC121006
  misc_feature [331]..[331]: Chromosome 12, SNP identification no. = rs7312252
  misc_feature [331]..[331]: allele = t, in linkage disequilibrium with rs7136702, respectively
  misc_feature [331]..[331]: n is a, t, c or g
ttggagaccaaccatgatccacaaaatatacttggcatctccgctggagatatatatggatgaaatggatcacgttatatgtcatttcttattttccaaaaaatatatctccttttgctatcttaaacaagcttccttcccatagaccttatataaggcagtcctttagaacatatggcctgacaaatatgaatatacttctgggacaatgacagaaaatatttgcaatcagaactaaaccagaaaactagacgtaaataattatatctacctggcatgctggatcagcctataggcaatgtacttgcggaataagtatcccaactgaacngtgtccatatgaagtatctcaattatgagagtcctagccattgtgtgtagctgtgaagggagtccacaagtttttatagcctgatttaatagtatcaggttcttcttctgagcctccacatcaacaaaatacctcttttcttcaagttcttgaggagaggaagggggcaccattactttgggtttcttggtatctgaaactgaactcagtatccagggcttgtctataggagggaatcgggatttctggtaccattccaaaggtgaaatctgtgatgttctgagtagagtagtgagagaagatggtgatgttgttggcttcatgagagtg

SEQ ID NO: 4365 - DNA, 661 bp, Homo sapiens
  LOC121006
  misc_feature [331]..[331]: Chromosome 12, SNP identification no. = rs10506292
  misc_feature [331]..[331]: allele = t, in linkage disequilibrium with rs7136702, respectively
  misc_feature [331]..[331]: n is a, t, c or g
ccattccaaaggtgaaatctgtgatgttctgagtagagtagtgagagaagatggtgatgttgttggcttcatgagagtgagaagggccctttcatcagtgtaaggggtttggtatactggtgtcctatatttggtgaaatgggactgaaatgttctaaatgattctatagcaaaagtgtctcgaagtatctgggtttcttcggaagtgtcagagacctccgacatttggaacttcttagtggtgaaaggaacttgagctaccttgaaatctggagcactaggatggatcaatactgatttagatttcagagaagaaataattgccaatctnttcttagcaacagaaggggaccaacttttctggggctttccaggggctggggacggccatagtgtgggaggatgtctagaggtgggagggatccataatgaagaagctcgcccaggaagggtccatgttgccagatgctgcccaggggtagaaggagcctgcagatagggagattgctcagcagtggcaggaggctggaattcctggagctgctcagagaaggttaagggtccagattccaggaggtccccagggatggaagaggcttcaggaactaagggctgcccaggagaaagaggagcccagagacttggaatctgtccagaagtg

SEQ ID NO: 4366 - DNA, 661 bp, Homo sapiens
  LOC121006
  misc_feature [331]..[331]: Chromosome 12, SNP identification no. = rs10876023
  misc_feature [331]..[331]: allele = a, in linkage disequilibrium with rs7136702, respectively
  misc_feature [331]..[331]: n is a, t, c or g
tgctgaggggtgagagtgatctcctgagtctgcgcctgctgaggggtgagagggatccccagggcctgcgcctgctgaggggtgaaagggatccccagagcctgtgcctgcttaggggtgagagggatccccagggtctgggcctgctgagggttgagagggatccccaattcctgagcctgcttaggggtgagagtgatccccagggcctgggcctgctgaggagtaagagggatccccagttcctgaacctgcttaggggtgagagtgattccgagagcctgcgcctgctgaggggtgagagggatccccaattgctgggcctgctgangggttagagtgatccccagggcctgggcctgctgaggggtgagagggatccccaattcctgagcctgctgaggggtgagagagaccctcagggcctgggcctgctgaggggtgagagggatccccaattcctgagcctgctgaggggtgagagggatccccagggcctgggcctgctgaggggtaagagggatccctagtttctgagcctgctgagtggtgagagagatccccggggcctggtcctgctgaggggtgagagtgatcccttgaacctgggtctgctgaggggtgagagggatccccagggcctgcgcctgctgaggggtga

SEQ ID NO: 4367 - DNA, 661 bp, Homo sapiens
  LOC121006
  misc_feature [331]..[331]: Chromosome 12, SNP identification no. = rs4421818
  misc_feature [331]..[331]: allele = g, in linkage disequilibrium with rs7136702, respectively
  misc_feature [331]..[331]: n is a, t, c or g
tgaccttcctaaattgctccaacatcatcatacttgttccacttttgccaccttggctctttgtttcagttaaagagagatgttttctttttgcttcagtgggtgactttgatttatcttcagaaaaggatttcatttcttttcttttctttttcagtacttgtagctcatagtattgactaggtttggcctctgagactttctgtccacttttattatcactcagatttggtccagaggtctcatatacatatgtggcttttttgtggcttcttttccatgattgatactcatcagtctcatcttcctgatagaaatcacctttcttcantgatacgttatctttagtgctgtcttcggaaatatcttcagaagcaacaggttgctgtcgtagttcagttaaatctggagttctttcagcttgggctgtatatgaaatagtggagtcccattttatcccagagtccttggtctcttttctttggacttcatctacaatattttcaagttccttgtctaaaatattgtccatattgtcctcagtatcaccaactttgattatcgccctggatgactgtggagaaggtccaggtaacactttcaaggttgatgatgtggacaattttgcatatagttgttctataacaattttggatcgaat

SEQ ID NO: 4368 - DNA, 661 bp, Homo sapiens
  LOC121006
  misc_feature [331]..[331]: Chromosome 12, SNP identification no. = rs11169390
  misc_feature [331]..[331]: allele = t, in linkage disequilibrium with rs7136702, respectively
  misc_feature [331]..[331]: n is a, t, c or g
tataagataaagattaatctgaaaactttagctctaaaataaacagtattatttttaaagaatgactcttttcacacaatcacctagaagtttttctttctttttttgttgagaggggatctccttgtttcccaggctggagtgcagtggcacgattactgcagcctcaacttccttggctcaaacaatccacccacctcagcctccctgcctgagttgctggtgttacaggtgcaagccacagtacctggcaatcacctagaacttctgcctccagagtttaggacatgaactcagctgtgacctcaacttaattttagttacaagtttngggttagatataatgtatctaagacaaggccagggcttggtggttcacgcctgtaattccagcactttgggagacctgggtgggcagatgacctgaggtcaggaattcaagaccagcctggccaatatggtgaaaccctgtctctactaaaaatacaaaaattagccaggcgtgatggcgcatgcctgtaatcccagctactcaagaggctaaggcaggagaatcacttgaactcgggaggcggaggttgcagtgagccgagattgcgccactgcactcaagcctgggtaaaagagtgagacttcgtctcaacatacatacatacataca

SEQ ID NO: 4369 - DNA, 661 bp, Homo sapiens
  LOC121006
  misc_feature [331]..[331]: Chromosome 12, SNP identification no. = rs12303082
  misc_feature [331]..[331]: allele = t, in linkage disequilibrium with rs7136702, respectively
  misc_feature [331]..[331]: n is a, t, c or g
cgaggcaggtggataacttgaggtcaggaatttgagactagcctggccaacatggtgaaaccctgtctctactaaaaatacaaaaattagccaggcgtggtggtacacgtctgtagttccagctactctggaggctgaggcaggagaatcacctgaaacctggaggtggaggttgcattgaactgagatcaggccactgcacaccagcctgggtgatagagcgagactgaaaaaaaaaaaagttgtttctctaagaaaaagtcaaactccatctactccaactccaaaatcataaagcacccttacatatttttttcttttgtttcttctnttcgtcgaggaaagatgtactaaatctgcttagtatcttgacattgttctcaatagcttttaacgtgtccggtaacaactccatttgtgctatccagtggtggtgttcatcaacatccattagagtcatctcagacaaaacatcatcttgaagagagtaaaaaaaaaatcatttttgtgcagaaaaataaataactatagctacataggcttataatattgggtaactactcaatacagtaatattggggaatataggtatctcacacttactgccattctgaggcttttctctatgaagaaattaaaaaggaagaaacttggaatagaa

SEQ ID NO: 4370 - DNA, 661 bp, Homo sapiens
  LOC121006
  misc_feature [331]..[331]: Chromosome 12, SNP identification no. = rs11833608
  misc_feature [331]..[331]: allele = a, in linkage disequilibrium with rs7136702, respectively
  misc_feature [331]..[331]: n is a, t, c or g
cctcttaaaaaaaaattcctttttctgccttcatcatcctagcaatgctatgatataatggaaagagcattgggtttgaagccatatctggatcttaactctaggtctttcattaaaatgacttttaataaatcacggcatgtctgagctccctctgccgcctctgtaaaatgatggagatactaaatacacagttgatgtgaagtgtataaaatttgtgaaagtgctttataagctgtagctgctaaaaaaaaaaaagaaagaaagaaagaaaaagaaaacagaaaaaaatgcaagttgcttcttttttcctttcttacctggaaagcanttatcagactatgcctcaaacatacttttctttcattatctcctttgctcaagaatcttaccacttattagcttagtacattgagtatatggggaagagaaagaattttatcagcaaatctcttttcttcactctatcctagaaattttttacggatgtaattactacctcatatatggcacttggaaatttgtgaaatcatttttggttgtcataataattgtgaggatggactactggcatttagtagagggtactaaggaatgctagcccaccctacagtgcagtggacagtatcacacagtgaagaactgtctcaaatcctgtgtg

SEQ ID NO: 4371 - DNA, 661 bp, Homo sapiens
  LOC121006
  misc_feature [331]..[331]: Chromosome 12, SNP identification no. = rs7972202
  misc_feature [331]..[331]: allele = g, in linkage disequilibrium with rs7136702, respectively
  misc_feature [331]..[331]: n is a, t, c or g
ggcaacagagcaagactctgtctcaaaaataaataaataaatattttaaataataataataaatttagaaataaacttacccaaggaggtaaaagacttgttgttttcactacaaaatgttactgagagaaattaaagaaaacacaagtaaatggaaagatatcacatgtttatggattggaatatttaatattgttaagatgtcaatactacccaaaccaatctacagattaatgcaatccctatcaaaatcccaatggcttttttttcttttgcagcaatagaaaaattcatcctaaaatttacatggaatctcaagggatcctgaatngctgaaacaatcttgaaaaagaataacaaagttggagatcccacattttctgatttcaaacttattccaaagctacattaatcaaaataatgtggtacaggcataacgacagacatataacctgatggaatagaatagagagcccataaataaacaccaagttaacagtatgtgtatagtatagtatattcatagcataaggttaaattattttccataaggattctaaggccatccaatgaggaaaggacagtcttttaaaaaaaaaaaaaacacacacaaatgttggtgggaaaactgaatacctacacatgaaagaatgaagttgga

SEQ ID NO: 4372 - DNA, 661 bp, Homo sapiens
  LOC121006
  misc_feature [331]..[331]: Chromosome 12, SNP identification no. = rs4348979
  misc_feature [331]..[331]: allele = g, in linkage disequilibrium with rs7136702, respectively
  misc_feature [331]..[331]: n is a, t, c or g
acatggtgaaaccccgtctctactaaaaatacaaaaaaaattagccaggcatggtggtgggcgcctgtagacccaactactcgggaggctgaggcaggagaattacttgaacccgggaggcagaggttgcagtgagctgagatcgagccactgcactccagcctcagcctgggcgacagagtgagactccgtctcaaaaaaaaaaaaaaaaaagataaatggactatatcaaagttaaaaacatttgtttgtcaaaggacaaaaatcaacagattgaaaagtcaacctaggaaatgggagaaaatatttgcaaattgtatatccactaagngttaatatccacaatatataaataacttgtacaaactcaatgtcaaaaaaagaaaaaccaaaaaacccaaataggctgtgcactggtggctcacccctataatcccaggactttgggaggctgaggtggacagatcagttgaagtcaggagtttgagaccagcctggccaacactgtgaaaccccatccctactaaaaatgcaaaatttaggccgggcgcggtggctcacgcctgtaatcccagcactttgggaggccgaggagggtggatcatgaggtcaggagatcgagaccatcctgactaacacagtgaaaccccgtctctactaa

SEQ ID NO: 4373 - DNA, 661 bp, Homo sapiens
  LOC121006
  misc_feature [331]..[331]: Chromosome 12, SNP identification no. = rs12422417
  misc_feature [331]..[331]: allele = g, in linkage disequilibrium with rs7136702, respectively
  misc_feature [331]..[331]: n is a, t, c or g
tccagatattaaaaatagtatcactatatgatctagcaattgttctctgtgtatacatccaaaagaattataagcagggtccctaagaaatatttgtacactcatgctcatagtgtcgttattcacaataaccaagaggtagaagtaacccaagtgcccattgacagataaatggataaacaaaatgtggtatatatttatatatatacacaatggaggccaggcacagtgactcatgcctgtaatcccggcactttgggaggctgaggtgggcaggtcacttgaggtcaggggtttgagaccacgctggccaacacgatgaaacctcacnttgcactaaaaaacacaaaaattagccaggcatggtggcgggtgcctgtaatcccagctacttgggagactgaggcagaagaatcgcttgaacccaggagatggaggttacagtgagccaagattgcaccacagcactccagcctgagcaacagagcgagacttcatctcaaaaaaataaaatttaattcaatttaatttttttttttgaggcagaatcttactctgtcacctaggctagagtgcagtggcatgatctcggctgactgcaaactccacctcagggttcaagtgattctcctgcctcagcctccagagtagctggggttac

SEQ ID NO: 4374 - DNA, 661 bp, Homo sapiens
  misc_feature [331]..[331]: Chromosome 12, SNP identification no. = rs7136702
  misc_feature [331]..[331]: allele = c, t
  misc_feature [331]..[331]: n is a, t, c or g
aggctgaggcaggagaactgcttgaacccatgatgcagaggttgcagtgagccaggatcgcactgctgcactccagcctggtgacagagcgagactccttatcaaaaaataataattaataatacaaaagttagctggatgtggcggtgtgcacttgtaatcccaactactctggagtcccaactactctggaggctgggaggatcacttgagcctggaagatggagattgcagtgagccaaggtcccaccactgcactccagcctgggggatacagaaagactgtctcaaaacaacaacaacagcaaatgtgctctgcagaagagactgntgagagaataaaatacaagccacagactgggggggaaattgcaaaagatatatctgataagcaactgttcgctaatatatacaaagaacttaaaacaaatttttttttattagctgggtgtggtaatgtgtacctgtagtcccagctacttgggagagtgaggtgggaggatcacttgagcctgggagtttgaggctgtggtccactacagcctgggtgacagggccagaccctgtctcaaaaaaaattaaaaagtgaaccaaagactttaacaaacatcttgccaaaaaagacatatcgtatggaaaataaggatctgaaaaaggtgct

SEQ ID NO: 4375 - DNA, 661 bp, Homo sapiens
  misc_feature [331]..[331]: Chromosome 12, SNP identification no. = rs11169453
  misc_feature [331]..[331]: allele = c, in linkage disequilibrium with rs7136702, respectively
  misc_feature [331]..[331]: n is a, t, c or g
aatgaggccgggtgtggtggctcatgcctataatcccagcactttgggaggccgaggcaggtggatcacctgaggtcaggagttcaagaccagcctggccaacatagtgaaaccccatctctactaaaaatacaaaaattagccaggagtggtggtgtgccgagaccagctcggtcagggagaccctaacccagcggtgctagaggaattaaagccacacacacagaaatatagaggtgtgaagtgggaaatcaggggtctcacagccttcagagctgagagtcccaaacagagatttacccacatatttattaacagcaagccagtcatnagcatttttctatagatattaaattaactaaaagtatcccttatgggaaatgaagggatgggccaaattaaaggaataggctgggctagttaactgcagcaggagcatgtccttaaggcacagatcgctcatgctattgtttgtggcttaagaatgcctttaagcggttttctgccctgggcgggccaggtgttcctcccgtgaacccacaaccttccagtggggcactagggccattatgaacatgttacagtgctgcagagattttgtttatggccagttttgaggccagtttttggccagattttggggggcttgctcccaacatgt

SEQ ID NO: 4376 - DNA, 661 bp, Homo sapiens
  LOC439917
  misc_feature [331]..[331]: Chromosome 12, SNP identification no. = rs11169484
  misc_feature [331]..[331]: allele = a, in linkage disequilibrium with rs7136702, respectively
  misc_feature [331]..[331]: n is a, t, c or g
tgagccaccgcgcccagccagctatgaacatttttatatagttattcatattaaaaatatatttacatctttagtcatagattttaagatgcctatatagcagtctcaaatgaggtagcgcagaatctctggataggacattatgattaaaaaattcttttatagacgtctttgtgttttccatagtttcttcaatgcacttagttttatattctagaatttaaaaaaatcaacttacattaacactcttttcctttggagaatatagaaaaagctaagggtcacatgagagatttgcattaataaatgtagaaagaatcagtgtaacttncatgtgttaattacaatttttggaagcttaatgattttgtagaatcattgacaaggccatatgtatcaaataagcctatttgtaagttcttccagtcttgaattgtagtgtttctgtgaagtttgtaactttttaagcttcttttatttatttattttttatctaatatcagtcactcaaatttcctttgtcagcattacataggataaaggagacctatcaaaaacttttggaatccaaggacaaagaacattctttttttttttttttttttaaatccatagtcaccatcaacttctgttgggagaacagagaaagatagactaagag

SEQ ID NO: 4377 - DNA, 661 bp, Homo sapiens
  LOC439917
  misc_feature [331]..[331]: Chromosome 12, SNP identification no. = rs7487429
  misc_feature [331]..[331]: allele = t, in linkage disequilibrium with rs7136702, respectively
  misc_feature [331]..[331]: n is a, t, c or g
aacgctatctgggctcactgcaacctctgcctcctgggttctagtgattctcctgcctctgactcccaagtagctgagattacaggcgtgtgccaccgtgcccagctagttttttgtatttttagtagaggcggggtttcaccatgttggccagctggtcttgaactcctgacctcaagtgatccacccgcctcggcctctcaaagtgtgggattatagctgtgagtcactgtgcccggcctaaaataagatttattgaggacttgtgtatagcatggtagaaataaaagcagaattccttctcttcattttacagttctttctgtggaantgagtacaactgaatatagcaggtggcagtgcctgtcaactttgtttccattctgcactgattgtattatcttattctaatccctgccaaccagatgtacttccttcttcacataagatggagacagcttattgtatatgcacacatgtgcaaatatgcataagtatagcaaaagttggtcctgctgttcagaaatatcgttaactagtatcaagtgagaggcggcatggtttacttcaggtacagcatatagttttagatgcttattcctcccctgttggtgggagttccgtgttgtgaaaaattcttttttaaaaaaatttcaacttt

SEQ ID NO: 4378 - DNA, 661 bp, Homo sapiens
  LOC439917
  misc_feature [331]..[331]: Chromosome 12, SNP identification no. = rs10876055
  misc_feature [331]..[331]: allele = g, in linkage disequilibrium with rs7136702, respectively
  misc_feature [331]..[331]: n is a, t, c or g
ttgtcaagttataactggttttatgtataaataatttagaaacacattacctataatacaaaacaattaaaaaatataccactctatttggctgtatttactacttttctgaaactgcttactcggaggttcggttcaccttacctccttatttttactcccttcttttttgaccttcgtggtactattaaccaccaactttggtgaaatcctttctttccttggcttcagtgaaaacatcactttctaaacaatgaatttcgttttctactggacaggggccctttatatagaggcaataaacttgtatgtttaactttgatgattgatnattgattcagttggtaatacaaattaaagtttggcttaaaacagtgaaatatttctgggaagtaattgaatgatgactgtacaacactagagtaatttaaaaatacttagtggaaatattcattgataccatctttttttagaagctaatttaacagtaactcaaagcagggttaattttgtgtaacctggcacccaacattatatgtctaggaatctgtccctcaataggatgaatggtaaaaacatatgtagagagatattaatcgaagtattatttgtaagaacaaaagatggaaacaacttaaacacttgtcaatagaaaaatagt

SEQ ID NO: 4379 - DNA, 661 bp, Homo sapiens
  LOC439917
  misc_feature [331]..[331]: Chromosome 12, SNP identification no. = rs10747583
  misc_feature [331]..[331]: allele = g, in linkage disequilibrium with rs7136702, respectively
  misc_feature [331]..[331]: n is a, t, c or g
tctattttgagttattttatttatttatttattttttcccagagtcttcagtggtgcaatcttggctcactgcaacgtctgcctcccaggttcaagccattctcctgcctcagcctcccgagtagctgggactacaggtgtgcgccaccatgcccggctaatttttgcattcttattagagacggggttttggcatattggccaggctggtcttgaactcctgacctcaggtgatctgcccacctcggcctcccaaagtgctgggattacaggtgtgagccactgcacccggcctgagttagttttctatatggtgtcagataaaggtacntcttcattcttctgcatgtggatgtccagttttcccagaaccatttgttgaagagactgccttttccccattgagtggtcttggcaccctttcatgtaagctgttattaaaattgtcatgttgttttgtgtgatcatttgaatatctctcccagtatgttgaagtaccatgaacgacagattgtgtttgttttgctgactgttgtatcccagtacctagcgcagtgcctggcacttagcacaggcaccctgtattcatttattgaataaaggcattaagcaatcctgaatgtaacaagagacagcctgtatgttgcaggtcagtttaagg

SEQ ID NO: 4380 - DNA, 661 bp, Homo sapiens
  LOC439917
  misc_feature [331]..[331]: Chromosome 12, SNP identification no. = rs3935870
  misc_feature [331]..[331]: allele = t, in linkage disequilibrium with rs7136702, respectively
  misc_feature [331]..[331]: n is a, t, c or g
ttgcagtttggttgtagaaacttgtctcttcagtgaatgaagtgctctgattcctttatgagagattcacttgtttgactgggttttgctgtgtcatgattgctttatcacttctgaaaatcaactctggaacattttccgtgccctgatttaaaatgaagaagttctccgatttttcctttagatatccgatttaaaatcttgatatcttgaaatcttgatatctagatctcttggggatttgtcttttacattctgtagtgtatagtatgtatattctatatatgtatgtgtgtatatatgtatatttgaatacccagagtgttctagngatattaattggatcagtaaatatttgagcacctactaagtgcgaacattgttctacatgagccagttgctgacattttggtgtataaagatacaggcagtaaatggctgggcgcagtggcccatacctgtaatctcagcactttgggaggctgaggcaggcggatcacttgcggtcaggagttcaagaccagcctgaccaacatggtaaaaccctgtctctattaaaaatgcaaaattagccaggtgtggtggcacatgcctgtaatcccagctacttggaaggctgaggcgagagaatcacttgaatccgggaggcagaagttacaat

SEQ ID NO: 4381 - DNA, 661 bp, Homo sapiens
  LOC439917
  misc_feature [331]..[331]: Chromosome 12, SNP identification no. = rs11169506
  misc_feature [331]..[331]: allele = t, in linkage disequilibrium with rs7136702, respectively
  misc_feature [331]..[331]: n is a, t, c or g
tataatgatctttttgcttttttttttttttgagacggagtctcgctctgtcacctaggctggagtgcagtggcgcgatctcggctcactgcaagttccacctcccgggttcatgccattctcctgcctcagtctcccgagtagctgggactacaggcgcccgctactacacctggctaattttttgtatttttagtagagatggggtttcaccgtgttagccaggatggtctcaatttcctgacctcatgatccacctgcctaggcctcccaaagtgctgggattacaggcgtgagccaccgcacccggccttttttgctatttttaaancaccagttggacacagtttccacagttggctgtctggtttaaaagatgaaaggggtcaggggcagtggctcatgcctatattcccagcactttgggaggccaaggcaggtggatcacttgaggtcaggagttggagaccagcctggccaacatggtgaaaccctgtctttactaaaaatacaaaaattacccggcagtggtggcatttgcccatagttccagctacttggaaggctgaggcaggagaagcacttgaaccccagaggtggaggttgcagtgagccaagattgcaccactatactccaacctgggcaacagagagagactcc

SEQ ID NO: 4382 - DNA, 661 bp, Homo sapiens
  LOC439917
  misc_feature [331]..[331]: Chromosome 12, SNP identification no. = rs12818741
  misc_feature [331]..[331]: allele = g, in linkage disequilibrium with rs7136702, respectively
  misc_feature [331]..[331]: n is a, t, c or g
aagcagaacaatgaaattgtaaagaaatagagtacctcaatccaaatacctttgggatttttatgtcccacctgacccttataattgtatataaatagtttttacatacagttataattatattgtgtacataatattttgtgttcttttatcacttggcattactttatttggactgaagtatctgcatagtctacatatttttcatttgtaatggcatatagtatctcattatgttgatacatgtagttaagtttcatctttgcttttagcttttctttaccatggcagtgaaactgtgtatatcttattcaaaacacaggaatctgtnttttagcaccccaggtaatttctgagatctagttggagtgtgaaaccatggtcagggaatgattcaccttgaggcagcatcttgcctgcccagctgacattacatatgctgttaaataatgtcctgctgtcctcccatgcccccatactccttcccacctctttttgatgaggcctgaggtatgggttgagtagcccttatctgaaatgcttgggactagaagtgtttcagattttttttttttggaatatttacattatataccagttgaccatctgaaatctgaaaattggcaattagaaatgtttcaaggaacattcctgtgagcat

SEQ ID NO: 4383 - DNA, 661 bp, Homo sapiens
  LOC439917
  misc_feature [331]..[331]: Chromosome 12, SNP identification no. = rs13378012
  misc_feature [331]..[331]: allele = c, in linkage disequilibrium with rs7136702, respectively
  misc_feature [331]..[331]: n is a, t, c or g
caactaatttttgtattttaatagagacggggtttcaccatattggccaggctggtctggagctcctgacctcgtgatccgcctgccttgacctaccaaagtgctgggattacaggcgtgagccactgcgctttgtctattattattattatttttgagacagagtctcactctgttgcccaggctggaatgcagtggtgctatcttggctcattgcaacctccgcctcctgggttaaagtaattctcgtgcctcagtctcccgagtagctaggattacaggcacataccaccgtgcccagctaatttttgtatttttaataaagatgagntttccctgtgttggccaggctggcctcaaactcctggcctcaagtgatccacccaccctggcctctcaatgtgctgggattacaggtgtgagccaccatgcccggcccagttattgttcttaatgacttttactctaagtatggattcttctgatttaatgctgggagctaaatgcagtactaactcgctttgccaccctaattgtgaacttttctgtctgtccaaatctaatctctgatctggtgatggctggcactggcacaccaagatcattttatttctgatatattcctcatgctgtagaaggtaagttgaattcagttcagcaa

SEQ ID NO: 4384 - DNA, 661 bp, Homo sapiens
  LOC439917
  misc_feature [331]..[331]: Chromosome 12, SNP identification no. = rs1316607
  misc_feature [331]..[331]: allele = a, in linkage disequilibrium with rs7136702, respectively
  misc_feature [331]..[331]: n is a, t, c or g
cagtgcagatggacaagaaaaatcagtaagaagtgtaagaattagaaaagaagtaaaactgtatttacagtttatgtgataatttatctagaaaactcgagagaatcaatgacagaattaacttaaaacaatttagtcagcaagatataaagcgagtacagaaatcaacaaccttaacatatgcaaataataagcagttaaaagatacaatagtagagcaaacttcatttacaaaagcaataaaggtaaaatatatttaggaataaacttaagaaatgtctaaaacctttatgaaaaaaactttaaaaccctgaaagacaaaaaagtaganctaataagtggaaagagatcccttgttcttagggcagtttaacaccatgaagacgccaggtctgtctaaattactttacaaatctaatctaatgccgataaaagctatcaaatttatttatagagttagaaaactcatttttgaagttcatttgggaaaataaacatataagaatagctaagagaacactgagaaagaaaagctacaaggagtgactgcacgttctagatattaaaacatcctatagagactaattaaaactgtttagtatggcacacagattagaaggcagaccattggaataacaagttcagagctagacaggcgtat

SEQ ID NO: 4385 - DNA, 661 bp, Homo sapiens
  LOC439917
  misc_feature [331]..[331]: Chromosome 12, SNP identification no. = rs10876077
  misc_feature [331]..[331]: allele = a, in linkage disequilibrium with rs7136702, respectively
  misc_feature [331]..[331]: n is a, t, c or g
aaaaaaaagttgattccaccaagaattatcaatggatgctaaaactagtgagttgaaaggttgacaaagtatgtaacatttatatagtctcaaaagtatcctcccatgaattacttattaattgcaaacggaagaatggttaagtttacagtgagtttatttagcagataccatagtgaccaaagtaaccaactttgcaattagagttatgttaccatagtggagcagacacctcctgacatcatgttttgagaaagacattatttctggctgggcatggtggctcatgcttgtaatcccagtgcagcattttgggggctgaagcaggagnattccttgagaccagtagttggagaccagcctgggcaatgtagtgacaccccatctttacaaaaaaaaaaagaagaagacaacaaattatttctatggtatttctgccaaattgcataacctgaaattaattataaggaaatatcaagcaagccaaaattaaagaacattttacaaaataactagtctgtacaaaaatatcaagataataaaaggcaaagtaaggctgagaaacagttctggattataggggaatcaagagacaggacaactaagtaggatttcctccagtagatcccagatcaggaaaaaaggtgggagggaaaaccta

SEQ ID NO: 4386 - DNA, 661 bp, Homo sapiens
  LOC439917
  misc_feature [331]..[331]: Chromosome 12, SNP identification no. = rs7309964
  misc_feature [331]..[331]: allele = g, in linkage disequilibrium with rs7136702, respectively
  misc_feature [331]..[331]: n is a, t, c or g
caatgaaattcaatccacaagttgtaaatcataacacccagaaatcatttagaaaggtttatctcacattagaccaaatgccctctttaactgcgtgcttcataagcttagaaccctgaaataaattcctgacttctgttttccccggcttttgcttccctatatttggttgagtttttttacccaccccccacccagcacgcttttctaatttaggcctattttcctgaagtcagagccaagctgaatacagacataagtggatttctcacaattcttctccagctgaaaattaaagaaagaaatactgatgctgtgccttctcctgtcntgcttggaaagcttacctgtgcaccctgactggctgcctttcctactaaggccatgaataagtccaggctaaggattgtttacgccacttcattccctagcacctagctcactgtttggcacgtatgttttttgttttttgtttttgtttttgagttggagtctcgctctgttgcccaggctagagtgcagtggtgcgatcgtggctcaccgaaacctctgcctccgaggttcaaacgattctcctgcttcagcctcccaagtagctgggattacaggcatgcaccaccatgcctgtctaattttttgtatttttagtagagatggggtt

SEQ ID NO: 4387 - DNA, 661 bp, Homo sapiens
  LOC439917
  misc_feature [331]..[331]: Chromosome 12, SNP identification no. = rs11169520
  misc_feature [331]..[331]: allele = a, in linkage disequilibrium with rs7136702, respectively
  misc_feature [331]..[331]: n is a, t, c or g
ctcctttgcaagtggagcacagtgtccatagacctagatggaaaataatctttgaggaaaaacaaggttttatttaaagaattacgcaggttgacatagtttaaactttggatgcccctctgaataaattgtatgtaaaataacgtagctatttaaaataacatgatttcccttatctcataatctaaaataagaatttctaagagtggttgagggaagggagtaggaaaagaaaagcattttttgtttgtttttgtcaaaattgttttaacattcacctcagaagctgtatatacatttcattcatataacccttaaagaaagcatttanctggccaaatctttgcatgtttatttaacatctatgaatacatccatatgttcatacagataatttccattttaatgtttgtttttactaaattacagcagtatggaatgtttaatcatttgagtcatgtttttgctttgcagtttcctcaagtgtctgataccacctatgtaagtggtttttcagaaaaagcttacaacatttctgaagatatttgtaaattttttaaaaaactggccgggcacagttggctcatgcctgtaatcccaacactttgggaggctgagacaggtggatcacctgaggccaggaatttgagaccagcccaga

SEQ ID NO: 4388 - DNA, 661 bp, Homo sapiens
  LOC439917
  misc_feature [331]..[331]: Chromosome 12, SNP identification no. = rs12427378
  misc_feature [331]..[331]: allele = c, in linkage disequilibrium with rs7136702, respectively
  misc_feature [331]..[331]: n is a, t, c or g
tcatctctattaaaaatacaaaaattagccggatgtggtgacacacacctgtagtcccagctacttgagaggctgaggcaagaattactcaaacagggagacagacagaggttgcagtgagccgagattgcaccactgcactccagcctgggcgacagagtgagactctgtcttaaaaaaaaaaaaaaaaaaaaaaacttagaacagaagtattcttctgattttcagtcttgtaattaaaaatattgttttcctccctttcagtatgatcagtttgcatcaaattatttctaaggatatgcagattctttcagaaaagaatttgaaatantatgtaaaccaggatgagcatctggtgatgttttatttctgtttcaaggcatgactggcttttgtaaactagaatgaatagaaagcttttgtggggaggcctactgtgtgttgggggtgaatgacactcatctaacccatcatttggaagtggccattgtctcattaactacactgatgatctgaatgttctttcattgaggtagacctgtttttttttctatatgactgttgtttttttttcctttttttccaggaaagttgtggagcagaagtttaaagttggcctacacacttcttaataaactggggaccaaaaatgaacctgtgt

SEQ ID NO: 4389 - DNA, 661 bp, Homo sapiens
  misc_feature [331]..[331]: Chromosome 12, SNP identification no. = rs7955736
  misc_feature [331]..[331]: allele = a, in linkage disequilibrium with rs7136702, respectively
  misc_feature [331]..[331]: n is a, t, c or g
cagggtaattggtgtgattttggttttagggaggtggtgtttattgttttctaatatgctaatattctaatattctggagttttcatatacaacaggaaaatttatgtaactcttatttttggaaaaataaaaatggtttggttccaacgcaggttagcccaatgccagatgacaattctcacattcctgggttgaaggaaattcgcatgtcctttcctgtagctgccaatcagtaatctctttaggtgctaataaaaagaaagagaaaccttagtctttccagaaataaatatttgaatctttagacaataagaaaacagcaacaaaacntactctctgatttttttattttattttttcctcctcttcacaaaatgcctcaaacatgggctgggtgcagtggttcacacctgtaatcccagcactttgggacactgaggcgggaggatcacttgaagccaggagttttagaccagcctgggcaacatagtgagaccccatctctacaaacaatttttttttttaattagctgggtgtggtggcatgcacctgtagtcccagctactcgggaggttaaggcgggaggattgcttgagcccaggagttcaaggcagcagtgagccatgatcttgccactgcatttgtgtgggcaacagagt

SEQ ID NO: 4390 - DNA, 661 bp, Homo sapiens
  misc_feature [331]..[331]: Chromosome 12, SNP identification no. = rs7137845
  misc_feature [331]..[331]: allele = c, in linkage disequilibrium with rs7136702, respectively
  misc_feature [331]..[331]: n is a, t, c or g
tgccttgtagtggatcttctatcctaattattttgatcataagtatacattcaagagaatgacggcaaaaaaaaaaggattcttcatgtaagaaagttacaaaagactttagggaagtacaagcgtttaggaaatgatgtactggcagagaaatttctctgctgcttatttagagaggttgggggtaagagaacggagaaatgaggagggaaaatagctctgcttaaaagaacagattagtagatgaaagataaagagcaagaataaacaaatggctggaaggtttgatattgaggttggtatagaaatgcaattggcaacatgatcccantaatggattaagcaaatccaagtgcacagcaggcaccaggctgaatgctttaagtgcattttctcatgtagtcctcacaagtaccctgtgaggtttggattattactaaacttactttatagatgaggagactaagacttaaaagaatttccgtagctgagcaaaggccacatgactcaaaaatggcagagctagactcagagttaggtctaactctaaaagctgtggccttcaccactctgcatcctgcctgagacatatgctcaccaattgttaagttaatgaacaggcaaatcaataaaaatttttttcaagatctgggggaaaatc

SEQ ID NO: 4391 - DNA, 661 bp, Homo sapiens
  misc_feature [331]..[331]: Chromosome 12, SNP identification no. = rs11169523
  misc_feature [331]..[331]: allele = a, in linkage disequilibrium with rs7136702, respectively
  misc_feature [331]..[331]: n is a, t, c or g
atcattaagcaggaacaagttagataccaagctttgtataccagtttgtcacattagatatctatctagatgtaaatatgcctagaagtatatgtgtgtgtatagatagaatgtttagagatatatacatatacacaccaactttttttttttaggaagtatcttttaggaaatttatatttgtcaaacttcccaagtttctaaaataagcatgtattctccgcatatttaggaaaaaaatacctcttggaagaaatgcctaagtcacaagaagtttctaactccttggctctgttgtaaccacattaccctatgagcagtcctctacccnttttgaggagaccctcaaaaacccgtgagaacttttagtcatttctctaaaaacatcaaatcaggctgggcgctgtggcttatgtctgtaatcccagcacattgggaggccgaggcaggaggatcacttgaggtcaggagttcaagaccagcctggccaacctggtgaaactccctctctactaaaaatacaaaattagccgtgcatggtggtgtatgcctgtaatcccagctatttgggaggctgaggcaggagaattgatcgaacctgggagacagaggttgcagtgagccgagattgcatcactgcactccagcctgggtgacagag

SEQ ID NO: 4392 - DNA, 661 bp, Homo sapiens
  misc_feature [331]..[331]: Chromosome 12, SNP identification no. = rs2090852
  misc_feature [331]..[331]: allele = c, in linkage disequilibrium with rs7136702, respectively
  misc_feature [331]..[331]: n is a, t, c or g
cagaggtgagactccatctaaaagaaaaagcaaacaaacatcaaatcagttgtttataagaggcaagtgacataattttgctacttaatactaaagatgatttctttgtcttcctattttttctattttaggggaaacaatagtaaatgtcttagactttaagaaggatgctgggctgtggcacggcatgtttgcggtaagctactcagatttaaggcccttagtgtaaattgtgcttgagataaggccagcatgttgtataactggagcatctctcagtgcttgtttgaaatttaaatccccaaaaggtcagtaatattttccagaggcnatataacctttccactggacagaatgttttgaatgactgccatgcataagctgcatgctgcaactgaagaagagtaacaaggtagatggggattctccccatcagagaggaacaggtagcatactatgggtgttagaaaaaggtgacttccttctaggtctgggcttcaaggcagtttttgtggaagaagtgacagctgagttggactttgaaaaataggtaagctttagacatacagagatttttgtaaggggatatagaggtagagagaggggacatttcaagtggcaaaactactatatgtaacatgccatataggtggagagagaa

SEQ ID NO: 4393 - DNA, 661 bp, Homo sapiens
  misc_feature [331]..[331]: Chromosome 12, SNP identification no. = rs2139930
  misc_feature [331]..[331]: allele = t, in linkage disequilibrium with rs7136702, respectively
  misc_feature [331]..[331]: n is a, t, c or g
ataattaaaattgctaacaaaataccagctcaattttaaaatactaagtatgtattttgtattgattacttttcttctttctttgtttttcagaatgtaatgaataagatgcacacaatcagcgtaccctactctgttatgaaaacctgtcctctctcttgggtccaaagagtacatgctcacaaaggtagtcacctgcaacatctgagctttaattatgtgactgtttgaattaagatttcagggatttcagagattttcaaattgcccttgtatgcccctgtcccttaacaaattgtagagtttagttactacagaattaggtaccttncctgttcatctcactgatgtcctctcttaagcattgagatgaattttttccaaatgcgagccttgaattagatttgactgtcttggtattcacagtttccttggctgggacactgtgacctgcctagagggtctcagtgaacaaacaattgtaggtccagtcagttgtctaaatgtgataatttctgcctctgagctattggcacaatctctttgaaaccgtttttatcttctccaagcaaatatcatgattccccaaataagtaaaaatgtttttattgtggtgtattacatatgtcccaaatttattgtgtatgttaacttcatcctt

SEQ ID NO: 4394 - DNA, 661 bp, Homo sapiens
  misc_feature [331]..[331]: Chromosome 12, SNP identification no. = rs11169524
  misc_feature [331]..[331]: allele = a, in linkage disequilibrium with rs7136702, respectively
  misc_feature [331]..[331]: n is a, t, c or g
gacctgcctagagggtctcagtgaacaaacaattgtaggtccagtcagttgtctaaatgtgataatttctgcctctgagctattggcacaatctctttgaaaccgtttttatcttctccaagcaaatatcatgattccccaaataagtaaaaatgtttttattgtggtgtattacatatgtcccaaatttattgtgtatgttaacttcatcctttttgaatttatagccaaggtagctttagtaaaatgtcgggacttgcactgggctatgatggcacatcgggaccaaagagacgtgagcttgagttccctccgaatgttaattgtgacngatggagctaacccctgtgagtatttcttcattgtggatctgggaatatcctgtgttttgatagattagggtttttcgccctgtactaagatataattcacatactgaaaaactcactcatttaagatgtgtaattcagtggttttggtatattcacgagttgtgtaaccatcattacaatctaagtttagaacattttcatcacccaaaaagaaaccacatgcccattatcagtcactcgccatttttcctcctgccccagccctagatgactgctaatctattgcctgtctccctagatttgcctattctgaacatttcttataaatg

SEQ ID NO: 4395 - DNA, 661 bp, Homo sapiens
  misc_feature [331]..[331]: Chromosome 12, SNP identification no. = rs4919748
  misc_feature [331]..[331]: allele = c, in linkage disequilibrium with rs2307028, respectively
  misc_feature [331]..[331]: n is a, t, c or g
gcaaggcctccctattttcatgaaattccatgcatggggctaaatctcactggcccaacaaggctttcaggaacctgttccaagaatcaacaaggtcacggttgttggagggaggtgtgcatgtgtgtcattctcctagagttttcatgagctgctcacttccccagctcctcaggggtgcctggggttatgtctgtggtgctgtccctgagtggcgaagaatgttggaggtggagcaggtcttctggagcaggagtggagggagctgtctaattacagaagcggggagaggacagtcagaggtgggggtctgggtagatttggggacacnctttttctatattggaccaattccaagtacctggagcagcacagtctcccctcttccaaagatttcccagctcctgctctgcagtctgactcgaatcagtttgctgcagatgcagaatgcactctctgccttggccaccctactgtgcctcccacccttgactgccgcagagttcattcagactccagttcctccagccctgtgtccatggggcctcatggtgtgcaggcagaaaggcacgtcgtttgcccaagaccagtccttgcccatgggagtctcgtgcagatccaaggtaggctcagggttgttctgcctttgggaaagcgggga

SEQ ID NO: 4396 - DNA, 661 bp, Homo sapiens
  KRT4
  misc_feature [331]..[331]: Chromosome 12, SNP identification no. = rs1994755
  misc_feature [331]..[331]: allele = a, in linkage disequilibrium with rs2307028, respectively
  misc_feature [331]..[331]: n is a, t, c or g
tatagaaaaagggtgtccccaaatctacccagacccccacctctgactgtcctctccccgcttctgtaattagacagctccctccactcctgctccagaagacctgctccacctccaacattcttcgccactcagggacagcaccacagacataaccccaggcacccctgaggagctggggaagtgagcagctcatgaaaactctaggagaatgacacacatgcacacctccctccaacaaccgtgaccttgttgattcttggaacaggttcctgaaagccttgttgggccagtgagatttagccccatgcatggaatttcatgaaaatanggaggccttgctagacacagagtataagcactctcataagctccataacttcttgctctatattcagcagagacccctggcctgcttctctcacacctatcaaatgccccccacctgcagacttaaaccccttccctccaggtttattccaggatcagcattgaaatggtgctaccccagggtgccctacaatggacaatgtgtgtataattgttggatgccccttcaatctgtacaactgccctgtaggcaaccttcagcctctgtacactgtacttctcccccaataatttgagtaacttagaagtagagacctgagaaactagtcga

SEQ ID NO: 4397 - DNA, 661 bp, Homo sapiens
  KRT4
  misc_feature [331]..[331]: Chromosome 12, SNP identification no. = rs2307028
  misc_feature [331]..[331]: allele = c, t
  misc_feature [331]..[331]: n is a, t, c or g
gctccatctggaagggagtgacacccacctgcttcttgatgttctcgatctctgcccgcagcctctggatcatcctgttgagctctgcaatttcactcttggtgttcttcaggttgtcaccatgttggtcaaccgagatctggagctgctggacctaagactcaagaagacacagagaaccaggtgttaggggcatttgggtagggtccattctcaagtgaactcagtgagaattgccacaggtggcaagaatagcaccaaatgtcaagtagtttcaaatcagaccaggaccaacgatgcctgggagagtctgttcatatctgacttctantgggcttgagctaatgatcacctgttcacagacatcaaaagcagagccccagagccagccccatctcctgagagatccataccacccaccttggtctggtacagggcttcagcctcagccttgctcctctgggcaatctcctcgtactgggcacggacctcggcaataatgctgtccaggtccaggttgcggttgttgtccatggaaaggaccacggacgtgtcgctgacatgggtctgcatctgggacagctcctgcagggcaaatgtctcacatcagcccccccaggaaagccttcactgacctgatacaggctcaagtaggagcaga

SEQ ID NO: 4398 - DNA, 661 bp, Homo sapiens
  KRT4
  misc_feature [331]..[331]: Chromosome 12, SNP identification no. = rs10783539
  misc_feature [331]..[331]: allele = c, in linkage disequilibrium with rs2307028, respectively
  misc_feature [331]..[331]: n is a, t, c or g
caagtgaagcagggatgaggcagagatggaccaaacccatgacttcagccaaagaccactccccaagggaaggggcaccctgaaggcactccctaccatccttcgtctcttaccttctttaggaccacaaagtcattctcggctgctgtgcgtttgttgatctcctcttcatacctgggggtgggcacggggagaaaaagacaaaaacccacagtgagctggtgtttctcagatctctgctgcttgttttcaagcatttccaaacaaatttggaaatatccacgtaattagttgcatttcccatattcatacagatattcatttaacctanattcattgaatataggaagtacccgtttaggccagggtttattcagatacatgaaaaccaaactttaaagagactgttttcgatagaaaacccagcaatgatgtagttgatttaatgtccctgaaagggctgtccttttggccattttggcagattaaattctcagcaatgtcatcagcacactccatttccctttgtttggtgggtgagtgaattgagagacagggttggtatttattttgtcagtcctatcccatagtgagtttaatgagaggtgctgtgtattcagtgttcactctgtgtcctgaaatatgccacatgctttctcta

SEQ ID NO: 4399 - DNA, 661 bp, Homo sapiens
  KRT4
  misc_feature [331]..[331]: Chromosome 12, SNP identification no. = rs7959052
  misc_feature [331]..[331]: allele = t, in linkage disequilibrium with rs2307028, respectively
  misc_feature [331]..[331]: n is a, t, c or g
agagggccttcctagacgccttcagagcctgagattctaagccactggagagagccccgggagcctgggtgtggctgggcacatgtgtcagatggcgtcccctccttcctccccatgtacttagtcttgaagtcctccacgctgtcctgcatggtcttcagctcagactgcaggcgccctttgtcattgcccaaggtatctagctgcttcctcaggacactgaggtaggtctcaaagaggggctcaaggtttttgctggaggtggtggtcgtctgctgctggagcaggttccatttggtctccaggaccttattctgttgctctaagaacngcacctgtgttgataaaggcaccagccaagtgatgagggcctgaagtgtggcaggagggccagccaaggcaacaccaacccagtcaatcccagggaactacacggcccaagaaccacccaagtagggccactatgttgcatctccagggcaccattcactcgggttgacatgatggccccattctcgagcccatagcaccaaggggtcacataggttgtggagaatagagcacagccagagaagcagggcctaacagtgcaacaagaacaacttcctagccgcaggcacccaaagccccaaagaacattaaacttctatgaaataacaaa

SEQ ID NO: 4400 - DNA, 661 bp, Homo sapiens
  KRT4
  misc_feature [331]..[331]: Chromosome 12, SNP identification no. = rs11830949
  misc_feature [331]..[331]: allele = g, in linkage disequilibrium with rs2307028, respectively
  misc_feature [331]..[331]: n is a, t, c or g
gttaagtccaataaatctctttcttttgtaaattgctcagactcaggtatgtctttatcagcagcgtaataatggcctaatacaccatccaatccatcttctcatctaccaaatgggacacctgcctcacaaggaattagacaatgtccccatggtgcctggcatataggaggtcagcaggcattcattctcttctttcccaggctttgccattgccatttacagggagaaatctggtgtgtttgttctccctcctttcctcaattcctcatagatgaaatgaccccaggtctgaggaagagcagtcaccagcacctggataatcccacanacccaagctgcccctagctgaatgaaagctggccagggagagagtgaacggctgcctccatgcacagagagagggcaggggccagtgctgaggacagagtggtcaggagatcccaccccagacgcagggctgcagggaaggccaggctggctgggagttcagccagctccttctccagccacttcctcccttgtccccattcccccaacccctccctcccctacctcgggtctgtctctgccaagatggcctctaagtaagtggagagggggtggaggggctgtggccatgaggactggaggccccaggccccatcacaggagaatgccc

SEQ ID NO: 4401 - DNA, 661 bp, Homo sapiens
  NAV3
  misc_feature [331]..[331]: Chromosome 12, SNP identification no. = rs1479031
  misc_feature [331]..[331]: allele = g, in linkage disequilibrium with rs2045989, respectively
  misc_feature [331]..[331]: n is a, t, c or g
gctttggagaattaccttttgtctaaattatgaaatcatttatcatattagaacattgtgtatgattcctctctttgaactagtttctgcaacattataggcatttcagatgttgctgtaacttgaatttactttcaggagaactcgtgcagctttcctgcagagtttacagatagctgtgtgagatgtttacacatattcaatgaatacttattgtgaagtaactactttgtgtaagaagccatctacatactttaaattctaattttatagttgttatattgtaatttctggatatttttctgagtcaatatagagcaggcatttactngatgaagaatcgtaaaaatatcaaagtaaaaacagaggttctcactacatttttaaagaaaggtaagaaatagacatggaaacaactattgataaccatgtaggaagcaaatacaagctaacatataaatattgtatttatcatatttatttcataattcatttacaattaaagaaatgaaaatatgttgctaatagcagagtcctcaggaaatgcattcatcaaaaaattcaactgaggctggtacagtggttcatgcctgtaatcccagcactttgggaggcagaggtgaggggattgcttgagctaaggagtttgagaccagcctgg

SEQ ID NO: 4402 - DNA, 661 bp, Homo sapiens
  NAV3
  misc_feature [331]..[331]: Chromosome 12, SNP identification no. = rs11831781
  misc_feature [331]..[331]: allele = g, in linkage disequilibrium with rs2045989, respectively
  misc_feature [331]..[331]: n is a, t, c or g
ttctcctgcctcagcctcctgagtagctgggactacaggtgcatggcacaacacctggctaattttttgtatttttagtcaagatggggtttcacggtgttagccgggatggtctcaatctcctgaccttgtgatccacccaccttggcctctcaacgtgctgggattacaggcgtgagccactgcgcccggcccaactatctgaattttatttcagcatttccatttactggctgtagattttgagaaaattatttgaacctattaaacgtcatttccttgatctcaaaattataatgatgaggataaaatatacgcaaagtgcttagtntggtacctggtaaaaagtgataaatttatgttggctattaaaagggaaaagaaaatagaagccataattgttggtgggtaactaattttgatattagttaagtgaagtagcattactataaattacgagtttcatgagattccttctgtgccattgagtgacacctgttaacatctcactggatgttaggtttctgaagaacatgggtttggatggactgaattagttataagaatttcctctatctctaattgtaggatttttacttgcatagcatgtaaaggatctttataaatataaaataggatgcaaagaaacaaaaaggaatca

SEQ ID NO: 4403 - DNA, 661 bp, Homo sapiens
  NAV3
  misc_feature [331]..[331]: Chromosome 12, SNP identification no. = rs2045989
  misc_feature [331]..[331]: allele = t, c
  misc_feature [331]..[331]: n is a, t, c or g
tttttttcaagaaacactcctgtcctttttctatctctctttcttctttcagatctcatcatcacacatctcttttgaatgtgctttaagttactaatattttaataagttactcctctgcagatgggggcatttgaagtcaagaaaatagggataccggaggaatatctgctagagcacagtagtgaactggatgaagctctccaaagatgctgtatttggcaagcacagtgtttcaaaaagattttagccagttttttaaacttgaaacttttacataaaattccaggtttctggcttattttgagaaatgagatctgtctacactgantccacattcttgcatgtcagcaatgagcgggagctttccctttcatacagagcctgtactcttcagttacccaactctccctaccacattctgttgcttctactcagcgcttttcactcatttactcttattcaaaatagggatcttgtcttatcttcatagacatttatttgagtttgcaacttctgtggtagctactggctagttctttctaattttgctggtggcctagtgagggttggttaaagtaatcaaatctcgataatttggttctttctattaatcaagtttctctctcatgttgttattatgggtagcttattgttgttt

SEQ ID NO: 4404 - DNA, 661 bp, Homo sapiens
  NAV3
  misc_feature [331]..[331]: Chromosome 12, SNP identification no. = rs2619062
  misc_feature [331]..[331]: allele = t, in linkage disequilibrium with rs2045989, respectively
  misc_feature [331]..[331]: n is a, t, c or g
tgagtagaagcaacagaatgtggtagggagagttgggtaactgaagagtacaggctctgtatgaaagggaaagctcccgctcattgctgacatgcaagaatgtggactcagtgtagacagatctcatttctcaaaataagccagaaacctggaattttatgtaaaagtttcaagtttaaaaaactggctaaaatctttttgaaacactgtgcttgccaaatacagcatctttggagagcttcatccagttcactactgtgctctagcagatattcctccggtatccctattttcttgacttcaaatgcccccatctgcagaggagtaactnattaaaatattagtaacttaaagcacattcaaaagagatgtgtgatgatgagatctgaaagaagaaagagagatagaaaaaggacaggagtgtttcttgaaaaaaaaaattctcacagattcacctaacatagactttgcattcctatgaccctactgacagaaatgcagatattcaatatgaatagagtaatcaacaaaggaagatagaaggtcaacagaaaattaattgctattctgtcaaaggacattttaattttaaaataggtttagaatgattgtgtgtgtgtgtgtgtgtgtgtgtgtgtttattttgtggggaggaggaagg

SEQ ID NO: 4405 - DNA, 661 bp, Homo sapiens
  NAV3
  misc_feature [331]..[331]: Chromosome 12, SNP identification no. = rs4142920
  misc_feature [331]..[331]: allele = t, in linkage disequilibrium with rs2045989, respectively
  misc_feature [331]..[331]: n is a, t, c or g
ttttctattgtgatttcccatgtccactgttgactatatcgtgaatacttggtccgttttggaaatcagcaaatcttaattctcatggaagtaaatctttggtacctgctaccagcagtttcagtaaatgattagtgcacactagcacacatatcacatgcctcctttcatgcgatagctttgaatattgactggcattttccatgtaatcctagaactctgaccccattctcttttgccctttcacctcatctctgctttttgatatttcctatatccatgaacaaagaggtcttttccttgccagaccttggttgtacttctgttggcntcagtttcaagtaacttcacagcagtttgaattgcaagctggtaagctgtcctaggcttcatacttatctggctcctgtggctccctctttgacttatttctccatgagttgtacctatagtctctattggccaatcctgggctcctattttgtcttttttttttttctttttcttttaggggtggggattgttggcagatgtttgtgggagtatatatctgtaatatgtctttattcattggcatgcttgctacccaaagcattgtgagaattgctaccacactaaagaagcctcaagagtgtgtatctttgtatttaccatggattct

SEQ ID NO: 4406 - DNA, 661 bp, Homo sapiens
  NAV3
  misc_feature [331]..[331]: Chromosome 12, SNP identification no. = rs2619065
  misc_feature [331]..[331]: allele = g, in linkage disequilibrium with rs2045989, respectively
  misc_feature [331]..[331]: n is a, t, c or g
aagcattgtgagaattgctaccacactaaagaagcctcaagagtgtgtatctttgtatttaccatggattctactcttgttaaatgcaacttccaatctcatagtcttttgtttcttcacagctctgcctccgagtggttggcctcccagctaaactcacgctggatgactttaggtcacaaggagttttccttttaagcacctatatttgtttgatgatttgctgcttttttattttcacttcatttgtttcttataaccattacagattatttttattcacattttatagaagaaaatgagatgattatggaaattaactacctagacnaatatcacacacacttgaacaaacactagatttttggcatttggtattttttatattatatcatgatttccgtcccaaccatcagaaagcctctaataatacatttgcatttcatttcgttttaaatatcatcgaacttgtcaaacattataagtttttatcacagacttaagtatatttaaaacatatttcaaattggcaaaaatgtagtatataatacatgatcctactatatttacaataagagaaaatgaataaattttggagtgaatatatagacgcaaacaaattgaaataaggtattgaacatttttcagaaaaaaataaact

SEQ ID NO: 4407 - DNA, 661 bp, Homo sapiens
  NAV3
  misc_feature [331]..[331]: Chromosome 12, SNP identification no. = rs7976374
  misc_feature [331]..[331]: allele = g, in linkage disequilibrium with rs2045989, respectively
  misc_feature [331]..[331]: n is a, t, c or g
acaattccctgaagcctcagatgattgttagcactgttaagcaataaggtatttgtaattaaggtatgcacattacatttttagacgtaatactcatgcacacttaatagactacagtatagtacaaacataacttttacatgaggtagaaaactaaaaattgtgtgacttgctttattgcactatttggtttaatgtagtgttctggaatggaacgtgcaatatctccaaggtgttcctgtatctaaataataaaatgaggcatattttacatgtccggaatttaaaagtttgtatgcctttttcaaaaaataaagcgttaattcactanctatgagaaacccatcatttaaccaacttaatatctattagtaatacatatttcttttttccttaatgcgctagcactttatttattaatcgttttaattttagattcaggaggtacatgtgcacgcttgttacatgggtatattgtgtgaggctgaggtttggggcaccaatgatcctgtcccccagacagtgagaatagtatccaacaggaaatttttcatctcttgcccctgtccctctctcctctctctagtggtcctcagtgtcattgttctcaatttttttttttttttttttgagttggagtctcactctttcgcccaggctg

SEQ ID NO: 4408 - DNA, 661 bp, Homo sapiens
  NAV3
  misc_feature [331]..[331]: Chromosome 12, SNP identification no. = rs11107287
  misc_feature [331]..[331]: allele = c, in linkage disequilibrium with rs2045989, respectively
  misc_feature [331]..[331]: n is a, t, c or g
tggagggggagagataacattaggagatatacctaatgctaaatgacgagttaatgggtgcagcacaccaacatggcacatgtatacatatgtaacaaacctgcacgttgtgcacatgtaccctaaaacttaaagtataattttttaaaaaaaagaaaaatgtggtaaagattattccaaaaggtaggtggtcgtgaaaaccaagctaacagggaacagaaggacacagcagtatttattaaatttacttcagaactactgccagattcactttaattctatcctatcttattttggacttaagaccaaaagttgttttcatgactttttnattacacttatgtctactgtaatttttcttctatactttatctgtgtcagagttggtgtttgctttctgaagtgctggttgtaccatatggttgctttaatttgaggaagtatcttatttaaaaaaaaaaagtaagaaagcgatttgaaatgagtatgtattcaatgcagaaatcagttattctcatatttaatgctttgtgatagagaagtcagtatattctccccgtggtctccaaatgcatttgaattcatctcaaattatttcattgaaagttcaccttttgtcatacaaaaatggtaacaatgtcttcagggatctggggctttt

SEQ ID NO: 4409 - DNA, 661 bp, Homo sapiens
  NAV3
  misc_feature [331]..[331]: Chromosome 12, SNP identification no. = rs1242291
  misc_feature [331]..[331]: allele = g, in linkage disequilibrium with rs2045989, respectively
  misc_feature [331]..[331]: n is a, t, c or g
ggaagaattggttgtttaaacagtctgacacctcctcccctctctctcttgctccctctttcctcatgtgacctgcctgctcccccttcaccttccaccatgattggaagcttcctgaggtgctcatcagaagcagatgctggcactgtgcttcctgtacagtctacagaactgtgagccaaaataaacctcttttctttataaattacccggtctcaaataacccttcataacaatgtaaaatgaaataatagacataagaatacccaaatttcctatctaattaaactccctatgagacatattttaagtatgccttgagagtaaaatngtgctattctgttaaaaatcttaacatcgaaatattaggaacattgtaaagatgtctcaaacatgaaaacaacaaaggcatttaagtgattgcatatatataatgacatatcttagttctctaatatctatcccaccatgaaaaatttatatgaaacccatttttagacattcattttgtgtgtctaaagtaaattgtgataccattaagattttatgttctaactatagactctgatgctagtctatttcaataaaatctttaatagtcataaaaattgatattattatattttatataaagcatccatgaagaagcatttatacaaga

SEQ ID NO: 4410 - DNA, 661 bp, Homo sapiens
  NAV3
  misc_feature [331]..[331]: Chromosome 12, SNP identification no. = rs11835731
  misc_feature [331]..[331]: allele = t, in linkage disequilibrium with rs2045989, respectively
  misc_feature [331]..[331]: n is a, t, c or g
atggagtgaaaaattactcataagagtttaccaaaactcagtcttctgaacttgaaaaaatgtattcgaaggatcaattatttatagtaccctatgtgaatttttcattttatgaccaaatgtgtttattttagtctaaaattaatgttttaaatcattgtcattaaactaattttcaagcaagttgagccacgctaattagaaatattcttataccactgatcatatattttttttaactccagggtgttcagaccccagtttcagaaacacagtctttattatcaaacagttctatgtttaaatcaagcctttacctcacatttgctgngtcattctggaaaagtagcttaaccttagcaagatttgtttttcaccaagttaaaaaggaatgatacctactgcattgagtttatggcaagcattccttgaggcaaggtaatgtaaatttcctggcatataatactgtttggggtggaattgtgcctaccaaaaaagatgtgttgaaattctaactccatcaccacctgtgaatgtgaccttatttggaaatgggtctttgcaggtgtatttaaagatcatacagaattagaatggactataatacaatgactagtgtcctcatgagaagacagaagtttagacatacacacacagagaa

SEQ ID NO: 4411 - DNA, 661 bp, Homo sapiens
  NAV3
  misc_feature [331]..[331]: Chromosome 12, SNP identification no. = rs1920425
  misc_feature [331]..[331]: allele = a, in linkage disequilibrium with rs2045989, respectively
  misc_feature [331]..[331]: n is a, t, c or g
taaacagttctaacatttactctttttcataaactactataagtttaatatattcataataagaataaaggtattatatgatcatagctaacatttatctaatatttaaccatgtactaggcattattccttcttttagtctagctaagtgactttcctcttagcaaaagaattgctgtgtacatgagatatggagtaaaagtacacgtatatgtaacacaaaaccatatagaccatgttttggggccaagtatgctacattaagaattttttcaccatgcatttttttcatgtcacaagttgactttggaagctactcaaacaaaactgngtctcaaatataaactgaaaattattaagggtcactgaaataactgaagataaaagacaataaaaataattatgaaaacacttaaatgtacatattacttatttctcagttcttgaaaaatgcatgtaaaacggcatggctcacatctgtaatcccagcactttgggaggccaaggcaggtggatcacgtgaggtcaggagttcgagaccagcctgagcaatatggtgaaaccccatctctagtaaaaatacaaaattaattttgtaatcccagctacttgggaggctgaggcaggagaaatgcttgaacccgggaggcagaatttgcag

SEQ ID NO: 4412 - DNA, 661 bp, Homo sapiens
  NAV3
  misc_feature [331]..[331]: Chromosome 12, SNP identification no. = rs1920428
  misc_feature [331]..[331]: allele = g, in linkage disequilibrium with rs2045989, respectively
  misc_feature [331]..[331]: n is a, t, c or g
gtaactctcattttaactccaaggaaaaggaatttagctatgagaaaacttatcataagacaatctttcccaagtcggttccaaactgcagttcttaacaacggcatgattttcctgctctaatatattcatttaataatagtcacaatttgttggttattccaggctgccaacgtttatgtaagtatggctacttctcggtttcaggatttttaagtgaatggttcctaccttggctaatccttgttcttgaacatttctatgaataatgaaaatagaattttgaactgcatctctatgacttcatgaactatttcacagtcggtattgncttaactgaggaacatttattagtctcaaaaattccaagttaaaatttgagtaaatattaacatttttagaatttcatatcttgaatatgcatatcctcaggcactagatttatgatgaccaaaagacgtttctcattttttcctcaaaatagttaccctagctttaaagttaagcctttgacaaagtctgttgaatatttcacataccactagacttaaatttcagcttctctactggcagatgagccttaagaataggtatccttttcgttttcttatgatgagattgttagaaatccaaatcttcaaacacaggttcaaaattctct

SEQ ID NO: 4413 - DNA, 661 bp, Homo sapiens
  NAV3
  misc_feature [331]..[331]: Chromosome 12, SNP identification no. = rs11107411
  misc_feature [331]..[331]: allele = t, in linkage disequilibrium with rs2045989, respectively
  misc_feature [331]..[331]: n is a, t, c or g
gtgatgaagagtccacaatatatgctcagaagatgctattaaattagtaaaaagataaccagaaaactgtaggtacaacacaatgatctctgcaagggaaatagggatttggggaatggatttttagctctctataggagttgtaattgaattcctgtacataagggagttgttctcctaagggtctggctgcaaggagaatctctgtaatttaaattaaaaccagctgctctaacaaactcctgaatttcaatggctctgtacacagtagactttcagcagtccacagtgtttcctgggggttgggtatggagttgagatgctttgttangtacagtcactcaagaactcagactaatgaaaacacacattttcattatgtggcctcattgttttacctggatatatcccaggtggcccatgggcaaaacgaagaataggttagagtatatttttgtgggctagagtaggaagagatgcataatactttagctcttattacattggtgatatctagtccatttttatccacctaaatgcaaggagaggagagctggaaatgaagtccttggtgagaagctgctttctagagaatattttatgctatggaaggtggagcacaaattttggtgaacagtgaaaatgtaataggttctctcat

SEQ ID NO: 4414 - DNA, 661 bp, Homo sapiens
  NAV3
  misc_feature [331]..[331]: Chromosome 12, SNP identification no. = rs1479020
  misc_feature [331]..[331]: allele = g, in linkage disequilibrium with rs2045989, respectively
  misc_feature [331]..[331]: n is a, t, c or g
ccattaaaagttttgggtaacatcatattgtcacaatatatgtaatacattcaccatctagctagttcacctcagtctgtacagatagttcacctcaatattcacattaaaatgaaagctcacactgtatgaagtttttcaaaaatctcaactttggagtttgatttaaaagtgaatattaatgagttgactaccccataagatcggtggatggtctatgaaggcaagtaaattataaagtaaacataaattgaagtctgataatttccttttactttttttctgtcattctctttcaatctctgacctagtgctgttaattttatctccntaacatctcttcacccttccactcctccattgctactatcattgccctgggtcgcttctcatcatctctcacccaatcactctaacagtcatataaacactttctgagtgcaggcaggctaagcattatactattctatacactacagatagtgattgctttaaaatgcaaatctgatcaagtaatttaacgtgttagtaaaaatcacaaaatagctcccacttaacttcaaaaaaaatgtcccttatgaagtcaatttattccatttttaagagaaaattagtttaaataaaaatagcaaaaagagtaaaacataactatgaaggttac

SEQ ID NO: 4415 - DNA, 661 bp, Homo sapiens
  NAV3
  misc_feature [331]..[331]: Chromosome 12, SNP identification no. = rs1242273
  misc_feature [331]..[331]: allele = t, in linkage disequilibrium with rs2045989, respectively
  misc_feature [331]..[331]: n is a, t, c or g
ttgagtcttaaaactgtggtgtacaaaattatatctttgaaaaaatatataacttcaccttttaagcctctttctctgtatagtaggagaaaatgtatttatctcagttcaaagtaacataatcactttcagtttaaaactcagtgtttgagggccaggctcattcagttccagattcttccttttctttctgcagtgatgggctggggagggttgttgattgtggttccttattatcatggcaccaggggtgacacagcttgttcattgccattgctacccaccaaggctgctgtctgatgagtgcccgaaggtaggattcctgtcatanataacttgacttattttaacctatcctcacatcttctgtgccctttttgcttttctgtgccagctctatacatccttcctgtcctgatttcaagtgctctctaggatcacttctttcttccagaaaattccatatggctcttgggaaattataaaaaaaaagtatgctttcctatactgttgtggtcaatgttgtcctttgtgattccattctcaggtccaaatgctactttgaaactcagtccagagaggtaacctcttaaatctgttctagggctccttttccttccaattctcttccctatactagtttttctttttgtgggaaaaa

SEQ ID NO: 4416 - DNA, 661 bp, Homo sapiens
  NAV3
  misc_feature [331]..[331]: Chromosome 12, SNP identification no. = rs1012088
  misc_feature [331]..[331]: allele = t, in linkage disequilibrium with rs2045989, respectively
  misc_feature [331]..[331]: n is a, t, c or g
aacaatgtgaattgttcctcaaagaatacatgctattgcataataggccccaaaattcatactgataaatgtaaaatataccatgatacctttgatttttatcacttttaattatggttaatgaatgattatgcatgcaattgtactagaatttctaagtagccctcttgtaaacgcaatctcagtaattcttctgaattccttgagataaaattattagatgggatgatatttatattcatcacgttgaagttcatcaaaacagtcgaagaagactggcttcagatttccagagataaatcgtattggaagctttagccagaacattcangattaaaatcttcaatgacccttttacaaaaattaccaaacactgaattatgattagtttgatattgttcccaattataccaatttcttcactaaaaaaactataattaattcatagcataagcctgcaaaatacattactgcacattttgtaactcattcagctgaaactaaaatgttaaatactgtgattattatttttgtgataatgaactgagggcaattttggagttcaaatccaatttcaggacctgatttcaccatcctgttgtatttatttaaagatcacattctaatgacagttgacaaggttgtttgtattctctctcat

SEQ ID NO: 4417 - DNA, 661 bp, Homo sapiens
  NAV3
  misc_feature [331]..[331]: Chromosome 12, SNP identification no. = rs1382640
  misc_feature [331]..[331]: allele = c, in linkage disequilibrium with rs2045989, respectively
  misc_feature [331]..[331]: n is a, t, c or g
tatatgtgagagcaaaattgcatctccttttattaatatccatgatctctatgttgaagatattgaagggtaagaaaaattacttgcataactgtctcctgaattagcacacaaatacatgatttttaggtggatgcttttatttggtaataatttttctcagttaagatttgattatatttgtatgatcatacattttttggaaggattttatactgtttagaatttaaaacattgagcacactccccttcttaacacttcatttaaatgatagaattgttttggccttctagtagaaacttcaggttaagtcagacttgagttgtgccnatctgtccataggcaaagactggggccatgggttgaaaaaggattcacaagggtgaggagaatgagttctggagtcagacagatctgacttgagaccacttactaccagtggaaccctggacaagttacttaaccttcagattcctcttgtaaaaaaaagtcttgttgtaaaacaaggagaaaaataatacttacattataggattgtgccaggactaaataagatagcacttgtaaagcatctgtcacaaagctagtcatgaaaaaacatgcttgctattattatcatcacatggcatctagttttattttgctgtgatagctttccaa

SEQ ID NO: 4418 - DNA, 661 bp, Homo sapiens
  NAV3
  misc_feature [331]..[331]: Chromosome 12, SNP identification no. = rs10859692
  misc_feature [331]..[331]: allele = t, in linkage disequilibrium with rs2045989, respectively
  misc_feature [331]..[331]: n is a, t, c or g
cccatttctaggtttttgacatataacaatactagcatatgagttcaggaaggtacatatgtcaggctgtctcttgcaactttagatataatagaaacacatttaaacaagtcaaatatctatcaactgggggattgatatatataatgcaatattaaaaatagatgaacatacatgaaatggctcttagaaaagctgttaaaatattgttacttataaatttgaaactgcaaaataatatgtaaaatttgagccaaatttggtttaaaatgtgatctcgtgtgtgtgtgtgtgtgtgtgtgtgtgtgtgttctgtggcatggtgtgaagngcggtgtagatacatcaattctggaactcttcataccaaattattcaaaaatggacagggttgaaagttgtggggagactttcattttttagtttctatacttctggtttattattattacttttttaaatgtgaatttgctttgttagaaatgtttaaaaagtttttaacatgcttggcatttagtgttcataactataaaatgcaacttaccttttcagcctaattttccctaattttagacattctgcctcaattacagtttttactgctgtgtcctagatttctttgcctgtcggcttttctatatgttatacccactgcaaggaa

SEQ ID NO: 4419 - DNA, 661 bp, Homo sapiens
  NAV3
  misc_feature [331]..[331]: Chromosome 12, SNP identification no. = rs7295890
  misc_feature [331]..[331]: allele = a, in linkage disequilibrium with rs2045989, respectively
  misc_feature [331]..[331]: n is a, t, c or g
gaagtcacaggagaagaaacctgaggtttttcactctaggaaatataaatatttatgtgatagaggtataggagtcaggaaagggaaagagtgttgagagagtgagactattgttgaggaacagaatcacagatgtggactgctaatccttagggaagatgcagtagctgaagctctaatacgtggactaccccagcaagtcagggcaaagtaagatgagcagaatgtgtaacatgctgtcaaatgttatgcagctaaatagctggtatactggaatgtggtatttctttttggtaattggataggcattgattacctgtatgtgaacatnttctgtagagtgaataacgtgttaaaaagtaactcagaagtgccaatatccattgagtcatgaataatttttctaagagtgtcctgttaagacactgttagagaaaaaaaaaaaataaatagcttgagaagaagacagagttgaggggagtttttgcaaggggggaagaaagcatagaaggaggaagcagtagagggaaaggaaagggttcagaggaatgaagtggtaagtaactataccaagtcctaaaggaagtagaagaggaggaaattttggtctgtgtggaagatttgatattggaaaacaatagggatacatttgtttctgtat

SEQ ID NO: 4420 - DNA, 661 bp, Homo sapiens
  NAV3
  misc_feature [331]..[331]: Chromosome 12, SNP identification no. = rs17817862
  misc_feature [331]..[331]: allele = c, in linkage disequilibrium with rs2045989, respectively
  misc_feature [331]..[331]: n is a, t, c or g
catacatgtttttaggtttagaagagtttaataactttataataaaacaataaattcccttgtttggttttgttttctggaacaaacttaaaagcagaaatttattaaaaaacaaaagaatatatcttcaggtcaatgaatactgatgtaatttttaataaattatatttataacacttttgccaattatagcttataatgaagatttaatatcatctataactgatacaaaatattaaacgatgctcataattctccaattatcaagtaaattaaagaagaatagcagggttttgaacaaaatattttatctgattatatcctcgggaantttccatatctatgtctatacagctagtcacagacacacacaactctgttctagcatacatgtgtttatagagcttagctccatattaggaagagtatgtttacatataaataattgaatatacccttctccatttctagtgtggatatatgtgtgtgtatacatacacacacacccacacatgcctagaaacttctcagtttcttacattgtgtaaattgtaataccatgatgcaaatccagtttaactgcaaaatttttaattacaccataggacctaattaataaacgtactccttgtatctaatcacagaccaactaaacaaataa

SEQ ID NO: 4421 - DNA, 661 bp, Homo sapiens
  NAV3
  misc_feature [331]..[331]: Chromosome 12, SNP identification no. = rs17817928
  misc_feature [331]..[331]: allele = t, in linkage disequilibrium with rs2045989, respectively
  misc_feature [331]..[331]: n is a, t, c or g
ttggttttgttttctggaacaaacttaaaagcagaaatttattaaaaaacaaaagaatatatcttcaggtcaatgaatactgatgtaatttttaataaattatatttataacacttttgccaattatagcttataatgaagatttaatatcatctataactgatacaaaatattaaacgatgctcataattctccaattatcaagtaaattaaagaagaatagcagggttttgaacaaaatattttatctgattatatcctcgggaactttccatatctatgtctatacagctagtcacagacacacacaactctgttctagcatacatgngtttatagagcttagctccatattaggaagagtatgtttacatataaataattgaatatacccttctccatttctagtgtggatatatgtgtgtgtatacatacacacacacccacacatgcctagaaacttctcagtttcttacattgtgtaaattgtaataccatgatgcaaatccagtttaactgcaaaatttttaattacaccataggacctaattaataaacgtactccttgtatctaatcacagaccaactaaacaaataaacaaaaaccgaagagcaaaacccaattactgtcccctattcctctccctattttgcaacacaa

SEQ ID NO: 4422 - DNA, 661 bp, Homo sapiens
  misc_feature [331]..[331]: Chromosome 12, SNP identification no. = rs12830764
  misc_feature [331]..[331]: allele = a, in linkage disequilibrium with rs10506966, respectively
  misc_feature [331]..[331]: n is a, t, c or g
attgttacaaccctcattttacagataaatcacaaatcaaaaagttaactgattttcacaaagatcacagattgtaagtgttagccgacactggacccaggtctgccaaattcctagcttgggatttatttttgcctgtggtaaattgattgtagtaatagcccccagttctttactcctccctaggtctgtgaccttgccatgtaactctacagttcctgcctattttgactgcactcagccatgtgacttgcattggccaatgatatgacacatatagacttgcaaagcactttcgcagttgagcttacctgctcttactcctccatcntggcctgataccatgtgtgggctaaatagaaatagtaccaagtcaccctggtagtcccactgaggctgtcagaaatcagccaacagccaaacaactcccaaacatgttagtgagcccacccagatcatctgagtcctgtcaaattttgagctaaccaaatgcttcttgttgtaagccactgaggttgtgtggttgttgatgcagaattgttgtggcaatagatgattaatacactacactgcccctgcagttagactgcctaggtttgaatcccagctccaatactagctgagtgaccttgggaagttactcaacatctctgtgcttcag

SEQ ID NO: 4423 - DNA, 661 bp, Homo sapiens
  misc_feature [331]..[331]: Chromosome 12, SNP identification no. = rs7974391
  misc_feature [331]..[331]: allele = c, in linkage disequilibrium with rs10506966, respectively
  misc_feature [331]..[331]: n is a, t, c or g
ggtaaatagcagcaagcaccattactaggtactctaaataaaaacctggaaatcaagttgatcatcccatctttgcatcttatacctactcagtaattcatgaaacccaacaattctcttaacagtatcttaactccactcccattccctctcagcattgtaatctaaggcaccaaatctctcctctggacaattctaagagcttcctaacaaaaatcccattttcattcttgcttttctctaatctactctaacacagcagactcaaaaagaaaatcatcccccagcttaagtccattcaaaaccttccagatgctttgtggagaaaaanaaaatctttactgtggcttgcaagacactgggtggttctgctcccaccaacttctgcaactttaactcatgtctttcattccctggcttactaaccttcagaacttagggatctttcatgaattccttgaatctgccaagttctttcctgtttcttctaggcttttgcacatgctgttccttctgtttggaactctctcttccttatttactatttagtcaatcccacatttatcttttaagcctcagctaaatgtcactccaatgaagaagttacacatgttcacccacacatgcagactacattaggttcccacattatacattttca

SEQ ID NO: 4424 - DNA, 661 bp, Homo sapiens
  misc_feature [331]..[331]: Chromosome 12, SNP identification no. = rs1983374
  misc_feature [331]..[331]: allele = a, in linkage disequilibrium with rs10506966, respectively
  misc_feature [331]..[331]: n is a, t, c or g
cacacacacacacacacatcacatgcatgacatatgcacaccaaatacaatatatcacacatattcacactaacacgccaataaaagacccccccaaacacacacatgctttatgaaaacacacatacacatacacaaagcacacaatacatagcccacacacatgcacattccacaggcatacacacactactacataccaatacatacactgcatgccatacaaatatatacatatacacatcatgcatacaccatatacaccatgcacgtgcatatacaacataaacacataacgcaaacacataccacagactatacacaccacatnaatttatcacaaactcatatacacatcaccccaaatgcaaatatacacacatatatcacaaatacacagacatatgcatatgcaacacatatagacatagccccacactacatgcaaatataccacatacacacatgtacacataacacatacaaattcactacatacacatatgaaccacatacaaacacacccccatgcccaaatgcacaacacagaacacacaaactccaaatacaaatgcatagacatacatatcacaaacatgcacacactgtgtgcaaatacacaccacacatacacagccaccatgtatctatctgtccccta

SEQ ID NO: 4425 - DNA, 661 bp, Homo sapiens
  misc_feature [331]..[331]: Chromosome 12, SNP identification no. = rs10777153
  misc_feature [331]..[331]: allele = c, in linkage disequilibrium with rs10506966, respectively
  misc_feature [331]..[331]: n is a, t, c or g
ggggtgagggataaaaggctacaaattgagtacagtgtatactgctcaggtgatgggtgcaccaaaatctcagaaatcaccactaaataactcatttgtaagaaaccaaacaccacttgttccccataaacctattgaaatttttttaaactttttttttaaaaagaatgagccacaatttggtaatgataattgtggcagatgctgaagactggttcatttaacaaccatttcaatctcctagcatgccctcctgctgtgagatacaggctggaaagttaaatctcacattctccagaatgttctgcaggaaacctaggttcttctaagnccactcacattctgcaagctacctgataccttatattcaatctctttctgtttacattggctgacctagattctatccctgcaactaggaatcctgactgacagagtcatattttaattctctgcttctttaaggattgaaggcatgaggaggctcataaaacaatttttatggctgtcttcttatcattggcacttttaacattattttgtttagagaaagagaagtaagcaccacacagaagactaggtcttgggagctgtgagtgctaatcagaagtgctaaatagctaccttcttattccagactgactcactagccatctgcaca

SEQ ID NO: 4426 - DNA, 661 bp, Homo sapiens
  misc_feature [331]..[331]: Chromosome 12, SNP identification no. = rs7974399
  misc_feature [331]..[331]: allele = t, in linkage disequilibrium with rs10506966, respectively
  misc_feature [331]..[331]: n is a, t, c or g
agatagaggaattaaaaataataatataactatattaagacaggaaaaagaaagtgagggattttctaaatccttatgagtcatagcagattgtccatagatatcggaaatttgtaaaccaaaaactagtgagataaacattttaatcacagtattaacccctaaaaacgaaccaaaagtagagtagcttacagaatttgcaataatttcttctaggcttgagacagtatgtgtatggttggatgtggccagggagtgtcacttttcactggaagctatcttttctcacactagccatttggaatctagaatctgcctatgtggtagacanagaattcatagggttgccaaaaagctacatgtgcaggagggctgcccaaaggaggggagaagcatgctctattgggggttttagactgtggatcaacagtgagggtgttcagtgtgtgcttttatccagacttagcagatgatcacttagacaatcagtctccagttcaatcctggcatgtaagaatttaaattgtgttttaaatatcaaccagtctggtgagataggcctcagaggatgctcttggagggctagtaaattgatacacagagtctgtttaggaacaatgtggtgatatatcaagaaccacaaacataatcatagccattg

SEQ ID NO: 4427 - DNA, 661 bp, Homo sapiens
  misc_feature [331]..[331]: Chromosome 12, SNP identification no. = rs1381859
  misc_feature [331]..[331]: allele = a, in linkage disequilibrium with rs10506966, respectively
  misc_feature [331]..[331]: n is a, t, c or g
ctgtgcacacatctgattttgtcactgcatgaatgcttctttagagcatagattttatttatctattttcgtatctatatctccaaagcagcctacttcaaatctaggcatacagattcaataaacatgtgttttatttctacataaatgctcacataaagagctaattgtgattaataatagcaatgggagttgatagataaatggcagcaatgagacctctaccctcaccatcactaaaatgttttcaaagaatcatgggcagaagaaagtaggaggtgcttcagcagcagtctgagatgaaggtgcagttggagaaggatcccatcanaaagctgcagagtcaacacccccatccttcttttcttattaccattaaccataggacacggaaggtagtgggtgtgggttgtactattactgacatcattttagagagctttttaggggctctgatgttacaacacttttcataagtgacataaaactacattgtgtggacgagcacggtgactcacacctataatcccagcactttgggaggccatggtgggatgatagcttgagctcaggaggttgaggctgcagtgagccatgtccatgccagtgcactccagcctaggcaacaaagcaagaccctgtctcaaaaaaataaaacaaa

SEQ ID NO: 4428 - DNA, 661 bp, Homo sapiens
  misc_feature [331]..[331]: Chromosome 12, SNP identification no. = rs995727
  misc_feature [331]..[331]: allele = a, in linkage disequilibrium with rs10506966, respectively
  misc_feature [331]..[331]: n is a, t, c or g
aactggttgttccttagacctgatattcaatactatcctttaaattctttttgtatctttcctctgtgttatctatttcccaaatccaataccttccttcttcttggtttgctatgtcatgttgataaagcatatcctccagtagctttctgagataaggtgtatgggtaggcaatatttaaaaaaccttaaacatctgagaagctctttatttaaccttcatatttaagtgatagtttatttgaatatagaattttttgatcgaaataaattcttaccagaattttaaaggcactgtgcatttccctgcctcaccccagtatattgcatngttactgagaaatttaatgccaatctaatcccaagttctttgtgtattaccagttattttctcacaggaatttttagtgcctttaaaaaaatctctaacattctgcatttcataatgttgtgtattggtgtgggtcttatttaacaacagaacatcaggtgccaatttttaactcaggtccataagttttaagaaaaaatttaaaattatctctttaattattttctgctatctattttcttgattatttatttcacccctaaatgtcttggttatgtttgtgcattcttccatgctctggggatatagcagtgaacacaattaacacaa

SEQ ID NO: 4429 - DNA, 661 bp, Homo sapiens
  misc_feature [331]..[331]: Chromosome 12, SNP identification no. = rs10777157
  misc_feature [331]..[331]: allele = c, in linkage disequilibrium with rs10506966, respectively
  misc_feature [331]..[331]: n is a, t, c or g
gttaggaacgtcagctctcaagagtgcagggctgtgtctgcctggtttctggctctgtctccagcaactaggagtgtagggtagtgctagctcatattatgtgtttaagtatttgttgaatggatcaataatcacatacatgtactaatataagagacctcatgaattcagtaattaatggctcccatttgctcagaaaaggtaactatatgagaggatgggtatgttaatttgcctgtggtagtcatttcactatctatatgtaaattaagataagtatatatcaaaacttcatgtgctccttaaatacacaatttaaagaaatctaacngaacaaatatatgctgagggcttctgcatgccaggctcagttttaggcactagggatactgtaaacaaaacagaaaaaaggaaattatttatcccgttggagcttgccttctagttgggtgagacaaagaatgaacactctaagcaagtaaaatatataagggctagttggggataagttgttagtagaaaattaaacagataaggcagatacagcatgtcaggtatggagaacagcctggaatgtttaaggtctagtgaggggaaggccagtgtgactgcagcagattgagtcaaaaggagaagagaaggagacaggcttgtaaacaca

SEQ ID NO: 4430 - DNA, 661 bp, Homo sapiens
  misc_feature [331]..[331]: Chromosome 12, SNP identification no. = rs899003
  misc_feature [331]..[331]: allele = t, in linkage disequilibrium with rs10506966, respectively
  misc_feature [331]..[331]: n is a, t, c or g
aaccaatgttttcaatgtcaaagattgtttccttttttggcttatcagccaccactgcttctcaataggtcatttgctcttccatctaaggaagatttatgggacacctattgtgtgtcaagtattgtgctagatccaggtctctgcctttatagggcaggcccacaataagtaacaatagcaacaaattattcattacaatgcatgctttgatagaggcattaacaggatatataggagcacagaggatggaacatttaaatcagaagcaagggaattaggaatgaaattcctagtgtaggtaatatttatacagaagactgaggaactngaaatagttaaagaaggcatgcttgtgggcgtgcccttgcacattgtgtatgtggtttatgtatggaagacagtcctcagtggagaaatgacagtatattagaagacacagaggcatgattggggaatgtcacactgaagtaattttatgtaggaggtcccatacctccctagatcataatctccacaaagagagcctcttattcatcagtgtgcactcagagcttggcacatgataggaactccataaatatttgtggaacaaatgaatgacctgaagtcataacttaataagttcaaactacctctgcaaatgatagcaagatattgg

SEQ ID NO: 4431 - DNA, 661 bp, Homo sapiens
  misc_feature [331]..[331]: Chromosome 12, SNP identification no. = rs10506966
  misc_feature [331]..[331]: allele = c, g
  misc_feature [331]..[331]: n is a, t, c or g
aagccaaaaaaggaaacaatctttgacattgaaaacattggttttagttttaaaagatttttatttgtgaacaagaagaaaggactattcatctcacattgtcttagaagcttggaaacaaattatatttaatacttgagactcttcagaatgttatagcctgtccttcaccaactcagcacattgatttaacagaagtccaggagtacagttagtattccttgtactgatctagcacatggcaagcgtgtgtgcacacacacaaacacatgcttatagggtacaaatcttctccttaggtgaattcactggatgtataaatgcacacaangtatcacacaacagatgttctactgaggaattaaaaatacataaataaatctttaaatttcagagggaaaaaatctattttaatagtttcccaagtatgaaattttagcagatggtgctaaataacttatcacatctctgggacctggcttatgccacatcatgttgggccacagctgaacagcctggcctcctgatttaaacgcaaccaagcgatatatttggcatttctgtgacattgagtgagaggctttaattcatgcccaagttgctattacataacctgaaccacaaatgagctgaagaagttatgtagcattctgtcactgtc

SEQ ID NO: 4432 - DNA, 661 bp, Homo sapiens
  misc_feature [331]..[331]: Chromosome 12, SNP identification no. = rs10860879
  misc_feature [331]..[331]: allele = g, in linkage disequilibrium with rs10778179, respectively
  misc_feature [331]..[331]: n is a, t, c or g
tcgtgatagtgagtaagtctcacaagatctaatgggtttatcgggggtttccagttttgcttcctcctcattctctcttgctgcggcaatgtaagaagtgccttttcccctctgccatgattctgaggcctccccagccatgtggaactgtaattccaattaaatctctttttcttcccagtctcgggtatgtctttatcagcagtgtgaatatgaactgatacaccccctttttgaagaataaaagggaaacctgcaagagggatgaaaatacactctaaaaagagaaattctctagatctgtgaaaagttatagcagaaaagaggaatnaatgtcttaggcttagaacatgaagatgattatctccaaaatggttttttaatgggtaccagaagaattgttaataagttacaagcagacacagactttttaaagataagtacagagaatcttgagaagaggacattctggaatgaaaatacacaagatgaaatgtgaagacagcaagttgaggagaaaaatgaacttgatgggatcaagaagatgcagcagccaatttagttaatttccctgtctgtgcttctttgtcagagtgagctctcaattccccagtaaggaaaggacacatgatttgctctgctcacaatgagtaggatccag

SEQ ID NO: 4433 - DNA, 661 bp, Homo sapiens
  misc_feature [331]..[331]: Chromosome 12, SNP identification no. = rs10778179
  misc_feature [331]..[331]: allele = a, g
  misc_feature [331]..[331]: n is a, t, c or g
ggcatttgtccctgtgggatattctctttcttgaggcattttctttctttggctcccatgactacattctaatgttttcattcctctgtagctttgtctttatctgtttctcttgttccttctttcccacttgaccttttaaatagttccttagcattcatctgagctacctcctcttccattctattcaagcagttccactcatgcccatggcttctgttcttactcacatactgatagtttttaaatctatgtactcagtccatacctcttgactgtataaacatccttctactagaaatttctactgagatattgcaacagtagctcntatgaaaccaaaatcatcctctttccagccacatctgcccctctttaacgaaatactatactttctatctgcccagtcattcaaactaaaaacttcggatttctcctagcatgctccctctccctcctctttcatatccaatcagttagcaagtcccgttgtgaaaactacagaacaaaaaaacctaggacccccactgatgtttgatttagtgcgagcaatctctaaactttatctccctcctgtgtgcctcacctcctgcacaattctgataggttcctactccttcccagcacacaggtcctggcaaaatataaagccctttgtgca

SEQ ID NO: 4434 - DNA, 661 bp, Homo sapiens
  misc_feature [331]..[331]: Chromosome 12, SNP identification no. = rs4609653
  misc_feature [331]..[331]: allele = g, in linkage disequilibrium with rs10778179, respectively
  misc_feature [331]..[331]: n is a, t, c or g
taaatacccagagctcagaatatcagagaacaaggcgatgaatgtagaagaggtgtgttaagtgaaattgtgatacaatttggagattgggctggaatgaagtgcactgacccaacctcaccctgtacatcccacctccaccaattttatagctgaaaaggagatttttccatcacatgccatagaataagtccaacccacatactttctctgtggacaaactctgtttaaaaacagtttttcatgcttaagaatgattaaagatgaaataaaatcagtgtggggtccataaaaaattatagaataaaggaaagtattggaatactcaaangaagaacctatttctgaaaatggcctattgtagtgtattaattaaggtgtaagcaaaaattcttaaaaaaaaaaaaaggtaaccggttgggtgtggtggttcacacctgtaatcccaacactttggtaggctgaggtgggtggatcacctgaggtcaggagtttgagaccagcctggccaatgtggcaaaggctgtctctactaaaaatacaaaaattagccaggtgtggtggcatgtgcctataagcccagctacttgggaggtaggagaatcacttgaatgggggaggcagaggttgcaatgagccaagatcatgccactgcactcca

SEQ ID NO: 4435 - DNA, 661 bp, Homo sapiens
  misc_feature [331]..[331]: Chromosome 12, SNP identification no. = rs1350358
  misc_feature [331]..[331]: allele = g, in linkage disequilibrium with rs10778179, respectively
  misc_feature [331]..[331]: n is a, t, c or g
ttgcttctattttcagtaggttaaagaatgacttcaaataaaaattttcaagaagggtacatgattaacctattttctcagtttatatgtgtctgttttgtttatcattgcatctaaagtgcctgacatcgaataagtatggttatatttgtagagaaaaactcagttcaataatgttttagtactttcccaggagttcgaggtcagtctcaaactcctgacctcaggtgatccacccaccttggcctaccaaagtgcttggattatatgtgtgagccactgcacccacatgaaagagtaagataatttggttgcacataaaattcttggnttctaattattttttctacctcaaaactctgtaaacattgaatttatcaatatgaagaagactgagcctagatttttcttactattattttttctgtctgtatttgtgttaaatttttctttatcctcttactccagaaatctcgcctggatgaatgtaaatttaattctcttttcactgattttctcttggaatggggtgagccctttatatctttaaatatctctcacttcatttcagttaagattgctctgtcttatatttttaattaataatttgattctatttgtgctgtttttccttttttttttttttttttttgagtggagt

SEQ ID NO: 4436 - DNA, 661 bp, Homo sapiens
  misc_feature [331]..[331]: Chromosome 12, SNP identification no. = rs10735381
  misc_feature [331]..[331]: allele = a, in linkage disequilibrium with rs10778179, respectively
  misc_feature [331]..[331]: n is a, t, c or g
aacaaaatgatcaagcctagtaaagtagcagtataaatgttttgggtgtaagaatggaagccagtgaaagtagaaaagaccaaattaccataagtatggttacaggatttcaatctttttctcagttgaaaacaaaataaacagtattattataaattatttggatttaaaatccaggattacatcaacaaagaccataaaatgagggacagatgggagaaaactagggaattaagaagatactttctgattcctaatcaagataaaagtcactgaggtttaaaaaataattttgaaaatcttacaagtagcaatttataaaatcagtaanaggaaagctccaaaacaatatagtactaatatagtacaagatgacagatgttagtagatgttagttttaactaaaagcatccatggaatctatttaacataacttgaaagtttaaaagcaaaattatgaacggtggtagatgttgtgaattcaatgagaaaacagatattttaataataacatcaaagcaattttttcccttgtaaaaaaacttttaagtttagaggtatatgtgcaggtttattatttagataaacttgtgtcatgagagttgtacatattatttcatcacccagatattaagcctagtacccattaattatgtttcct

SEQ ID NO: 4437 - DNA, 661 bp, Homo sapiens
  misc_feature [331]..[331]: Chromosome 12, SNP identification no. = rs1350356
  misc_feature [331]..[331]: allele = t, in linkage disequilibrium with rs10778179, respectively
  misc_feature [331]..[331]: n is a, t, c or g
taatccataatcccataacaaacatagcttcacttcaatatttactttatctgtccattcaacaatgctccaacaagaagccaagaagaaattacttagaattactaaacaatttttttattgattagaaaaattactttctagggtctttgaagcctggatattttttgtcttccctatccatggaagctaaaaaaaatcatgcaaaatattcaggtttatatattaactctctcttacaggaagttgccatacctcacagttcaaagtgtattctatagatcagcaatgttaaactgatatgtaattgtaatttgctaggtagcaaaantgattcaagaagaaaaacaacctaccatttatttacctttgtacaggcgattgcttaagttaccctgcttttaatatttgcacttggataaaatgcctatttatatataggaaagtcacagtgcaagatgctgctagcacaggcacaaagtattagaaactattttgtgaagattaatgattgtattaagtaactgaacaaataaggtccttgtctgattggttcaccaatgctatttcctatgataagttttctacttcttgaccttgctgtgaccctgttgcagtgtagttatttctcatgggtttactgacgtttgcttgtgagttt

SEQ ID NO: 4438 - DNA, 661 bp, Homo sapiens
  misc_feature [331]..[331]: Chromosome 12, SNP identification no. = rs3953512
  misc_feature [331]..[331]: allele = a, in linkage disequilibrium with rs10778179, respectively
  misc_feature [331]..[331]: n is a, t, c or g
cgcctgtacaaaggtaaataaatggtaggttgtttttcttcttgaatcatttttgctacctagcaaattacaattacatatcagtttaacattgctgatctatagaatacactttgaactgtgaggtatggcaacttcctgtaagagagagttaatatataaacctgaatattttgcatgattttttttagcttccatggatagggaagacaaaaaatatccaggcttcaaagaccctagaaagtaatttttctaatcaataaaaaaattgtttagtaattctaagtaatttcttcttggcttcttgttggagcattgttgaatggacagntaaagtaaatattgaagtgaagctatgtttgttatgggattatggattaaaccagttatttttaaaaatctgccaggaaaaaataactactgggtaagaggcttagtacctgggtgatgaaataatctgtacaacaaacccccatgacacaagtttacctatttaacaaacctacacatgtgctcctgaacctaaaataaaagttaaaaagaaaaagtctgccaggtaacctcctcatttactttacattaagttgaggtcctgatacatacatctcaaccttataattcaagactactgtgaaatacttctagttcacttgaaatagca

SEQ ID NO: 4439 - DNA, 661 bp, Homo sapiens
  misc_feature [331]..[331]: Chromosome 12, SNP identification no. = rs1902756
  misc_feature [331]..[331]: allele = a, in linkage disequilibrium with rs10778179, respectively
  misc_feature [331]..[331]: n is a, t, c or g
atctggaatggcagtattcttaccttctaatttaagttaattggttcatgttaatttcttatctatttgatgtttaaacagcactttcttctacttgtatctactctaagatggaaatgttataccatgatagcttttgctaccaactctcaaccgcttaacttacagagaagaatattcatttagggggattttgtgctttatctgagctcagaagtaatgccagaaaatgttaagcatgtactttttaagaacatataaggattttaattgtcctattaccatgctatttcaagtgaactagaagtatttcacagtagtcttgaattanaaggttgagatgtatgtatcaggacctcaacttaatgtaaagtaaatgaggaggttacctggcagactttttctttttaacttttattttaggttcaggagcacatgtgtaggtttgttaaataggtaaacttgtgtcatgggggtttgttgtacagattatttcatcacccaggtactaagcctcttacccagtagttattttttcctggcagatttttaaaaataactggtttaatccataatcccataacaaacatagcttcacttcaatatttactttatctgtccattcaacaatgctccaacaagaagccaagaagaaattact

SEQ ID NO: 4440 - DNA, 661 bp, Homo sapiens
  misc_feature [331]..[331]: Chromosome 12, SNP identification no. = rs1840958
  misc_feature [331]..[331]: allele = a, in linkage disequilibrium with rs10778179, respectively
  misc_feature [331]..[331]: n is a, t, c or g
gagtgaccacccagtcactattacattaaatatgtaatttgggcaccaaatttaaggtggaactacacaaaaacagacttcatcgctgtccatttttaaagtatgaaatttaaatgttgaaaatattcaatctggaatggcagtattcttaccttctaatttaagttaattggttcatgttaatttcttatctatttgatgtttaaacagcactttcttctacttgtatctactctaagatggaaatgttataccatgatagcttttgctaccaactctcaaccgcttaacttacagagaagaatattcatttagggggattttgtgcttnatctgagctcagaagtaatgccagaaaatgttaagcatgtactttttaagaacatataaggattttaattgtcctattaccatgctatttcaagtgaactagaagtatttcacagtagtcttgaattataaggttgagatgtatgtatcaggacctcaacttaatgtaaagtaaatgaggaggttacctggcagactttttctttttaacttttattttaggttcaggagcacatgtgtaggtttgttaaataggtaaacttgtgtcatgggggtttgttgtacagattatttcatcacccaggtactaagcctcttacccagtagttat

SEQ ID NO: 4441 - DNA, 661 bp, Homo sapiens
  misc_feature [331]..[331]: Chromosome 12, SNP identification no. = rs7970320
  misc_feature [331]..[331]: allele = c, in linkage disequilibrium with rs10778179, respectively
  misc_feature [331]..[331]: n is a, t, c or g
ccagcaaaaccttacggaatagataattcccatcttattcaaattgttccaaacaataaaaaaagatgggaagccagccaacatattttgtaaggccagcttaacaatgatatcaaaaccagactatgttctaagtgaaatttgatctataattttcttttagtttttgttgttgatgtgaatgggaattttctttatattatttgtaccaattggttactgcagcttcacatacaattttaatggggtttgatagaaagaaattttgtccttgaagaggtttacttgatttcatgtttagtttcaatagttctctcataccttcatgttnatagtaatatatatatatagtgtagacatactctctgatttatgagcacttatttgaacaacaacaacaacaaaagatgagaaagtctctaagatcccaactatcatacatcaaaattctctttcatctttctacattttacagataccttccgtatgtaagccatggagagctatacagatgttagtcattacaggatggtcactctgctctgacaggcttggaaaacagttctgtctgtaatccctaagaaacatgttttctttttgtagttccttcttctctgctaatgcttgctggacagagaactaatacttgagttgccacatt

SEQ ID NO: 4442 - DNA, 661 bp, Homo sapiens
  misc_feature [331]..[331]: Chromosome 12, SNP identification no. = rs10860887
  misc_feature [331]..[331]: allele = g, in linkage disequilibrium with rs10778179, respectively
  misc_feature [331]..[331]: n is a, t, c or g
tatttgtgagatggggttattaagactatatcacaggattgttagggagaatatgttacataatatgtgcaaaattatttagcatatcttctattacatataccttgtactctgtatatgttggttccgtttgcccttaaaatatttacagacaagcttggatacagatcacctaatcagtgttctttcgaaaaatttgttttgcagcagacccgatgctttctctcaagactcccaggtttcaaactggtcatatattgagggccagttacctggacaatgagggtaaatggcagtctgtaattatgatcttggtttctaggttgttagngactaatattaatcctcaaattgtatgtgaaatgtgtttatctggctataattgtatagtcttcttgaaagcattgatcagcaatgctaatttaacacgtatttccccaggggagtgcttttgagctagtggggttgccaatttattagttaactcatgccactttcttcagagcagaaatagaaacaggaaactcacaaaaagttacaggtatatattttcattttttatcaggtgaacaattcagtgtaaagataatcagagcatgcattgttctttgaagaacatagtgctgtgttggttggctggcaaatgatggtgaatactact

SEQ ID NO: 4443 - DNA, 661 bp, Homo sapiens
  misc_feature [331]..[331]: Chromosome 12, SNP identification no. = rs1463446
  misc_feature [331]..[331]: allele = a, in linkage disequilibrium with rs10778179, respectively
  misc_feature [331]..[331]: n is a, t, c or g
aacaactgaagaacaaaaggaagaatgaaataatcttcattgtgaacaataaaaatcattctacaaagcaagcttaagcatggcttatgattctcttaagttgtttctaaagatgtaccacttttgaatttcttggggtttgcaaactcaaactaataagacaaaacaaaacaaaaaaccaaggcacttgtaatctatcctttgattttgaaggaggttgatagagtaggataaataattctttcacaaagatatttcactgataacgtgttcatgtatttattcaaattgaatctgttttctgaaaacagctttattatctcctagtgtnagtatctcactctgcttttaattacacataactgagtagtattcaccatcatttgccagccaaccaacacagcactatgttcttcaaagaacaatgcatgctctgattatctttacactgaattgttcacctgataaaaaatgaaaatatatacctgtaactttttgtgagtttcctgtttctatttctgctctgaagaaagtggcatgagttaactaataaattggcaaccccactagctcaaaagcactcccctggggaaatacgtgttaaattagcattgctgatcaatgctttcaagaagactatacaattatagccagataaaca

SEQ ID NO: 4444 - DNA, 661 bp, Homo sapiens
  misc_feature [331]..[331]: Chromosome 12, SNP identification no. = rs1965257
  misc_feature [331]..[331]: allele = g, in linkage disequilibrium with rs10778179, respectively
  misc_feature [331]..[331]: n is a, t, c or g
agagaaacagctggacactggagactatggttggacatcggagggaagtggcttgacttcagagggacagcttgatggcattgctttggggccagactccagaggaagattatcttcccacttcatttccttttcagctccccttcctactgagagccactttcattggcaataaaatcctccacatttaccatctccaatttgttcatgcaacctcattcctcctggatgttggacaagaactcgggtgcaggtgcaaaaggctgtcacactgaccctccactgaactgtgaacacttaagccatctacagatggtaaagctaaaagagngctgactgtaacactctttctggggcttcaggggtctccagaatccccctagacactgccatggagccacacagagttttgctcctgccagtgcccaaaagtgctagccccagctccagttcacctgttctcccccttcctgtgaggggtggagcacagcaggaccaaatgagtggtgtccatccctaccagcactgaaggggctgctggctatttctagtgcccgggcactcgagtttcacccatgaagaggtcagagaaaattttctgcttcagtaggtgctttatcacaaacttctcattgtttataattctaaaattcacttgtca

SEQ ID NO: 4445 - DNA, 661 bp, Homo sapiens
  misc_feature [331]..[331]: Chromosome 12, SNP identification no. = rs10745945
  misc_feature [331]..[331]: allele = c, in linkage disequilibrium with rs10778179, respectively
  misc_feature [331]..[331]: n is a, t, c or g
gaaatgaagtgggaagataatcttcctctggagtctggccccaaagcaatgccatcaagctgtccctctgaagtcaagccacttccctccgatgtccaaccatagtctccagtgtccagctgtttctcttctctctggtggctgagcctggagtttttataggcacaggatggggggctgggagggccataggtgattttggaaaaggcaacattagagctggaaaacaggaatgcatgttctcacttttggccaccattccaggcttgagggtggggatttgccctcttctccccagaatttccctgcctcctgtccgtgtcttttcccncctctgaagaggcacatctaactgcagttagaatacaggaagttagttacttcctgctgccagagggcgttgttttggggagaatgggagtcagatttcttccagaggtctacctaagagttcctagcaaaagggagccatcgtccaaggctccagttgcctgtttagagtttgatggcttatcggtgagaagaaacaagttttacaaggttaagtatgcatggatcaaatgtgtgttatacaaagaggagctaaaaggagagaatcaagtgccaaagtttacagaaataagtgaaatatactaaccgttctgaaaacaacattgtaccc

SEQ ID NO: 4446 - DNA, 661 bp, Homo sapiens
  misc_feature [331]..[331]: Chromosome 12, SNP identification no. = rs1457594
  misc_feature [331]..[331]: allele = c, in linkage disequilibrium with rs10778179, respectively
  misc_feature [331]..[331]: n is a, t, c or g
cctggataggatcccagtgatgagatgggagaatgaaagaggagttactttcaggtgtgcataatagagggcttacgcaggattagaactaagcctctcaattataccaagctatccaggacagtccagggatttgatgagaatcctactgccttcctggagaggataagagaggccttcataaggcacacatctctatctcctgcttcagttgaggaacatctaatcctaaaagatgaatgtattactcaggaagcccctgatatcagggggaagctgcagaaaaaggccctgagaccagatagtactttagagaacctcctcaaagtgntcaccacggtcttttacagtaggtcactggaatagattcttaaatttattatacccaaataaagacctgggaagttgacagagttatcgccatcaacccagaagagcacccaaagttccaatgtaaatagatgggggacatcaagctaaaaatcacaaaagataagttttaataattaaccttccatggatatcctccttatagtcttgcctatgcttgctgtttttactttttttctgttctatatcatggggtacaatgttgttttcagaacggttagtatatttcacttatttctgtaaactttggcacttgattctctccttttag

SEQ ID NO: 4447 - DNA, 661 bp, Homo sapiens
  misc_feature [331]..[331]: Chromosome 12, SNP identification no. = rs10860889
  misc_feature [331]..[331]: allele = c, in linkage disequilibrium with rs10778179, respectively
  misc_feature [331]..[331]: n is a, t, c or g
aggaaagaggaaaaaaacagcttaaggagaagaaccccttgccctatgcaaattggttcctttaatcactgcatccctcccccagttcagaccaagctgaactccttggtcaggggagggatggctctatgcgcccttggcaggagggggtggtgagcaggaaactctggccagctggccacatggggtccctggcccccaagactgccctggagccctggtggcggcggtggttctctcccaccgcctgtggccattgggcgtggcatgtgcatgctgcagatgtgcccaagtgccccagctgggaggggagggcatgaagatgggagcnactgcgtgccatgtgtgcctgcagctgttggggttggggaggggacggcatctccaagaacaaatggaaatcagattgttctgaattgcatatctgattgctggagccaacgctcattctacttaatatttctgcagtttgcagcaaaacacttaacattatgaaaggataggagccatttcaaactgtgaaagaagaaaggaaagataccatagaaaagtctggagttcttgtccaacgacttgatgggcagttggggactggatttgggggccttctggcaacactgaggagtggccttggccagatgcattcagttgcctcaggact

SEQ ID NO: 4448 - DNA, 661 bp, Homo sapiens
  misc_feature [331]..[331]: Chromosome 12, SNP identification no. = rs2100634
  misc_feature [331]..[331]: allele = g, in linkage disequilibrium with rs10778179, respectively
  misc_feature [331]..[331]: n is a, t, c or g
accctaaagcctggaatcatggcccaaagtgagaacacacattactgttttcccgcttgaatgttgccacttccaaaaccacccatggcccaccctgcccctaatcctgtgcccataaaaccccccaggctcagccagcagaagaggcaaagaggagaagcagcaggatgtcatagactatggttggacatggagagaagcagcttgacttcatagggtcatcttgatggcattgcttcagagaggagtccagctgggaatggctggattctggagaaagatgaacttcctgctctgtcccctttcagctccccttcctgctgagtgccantttaatcagcaataaaatcccccacatttactatctgcaattcgtttatgcaacctcattcctcctggatgccggacaagaacttgggtatgggagcaaaatgctgttgcactgaccttccactgagctcttaacacttaagccatccacagacagcaaagctaaaagagcgttaaatataacactatttctggagcttcaagggttgcaggtgcccccctagatgctgctgcagggctgcatggagctttgctcctgctgatgcccaaaagtgctcgtcctggctcctgcaccctctcacctgtgcctcccatcctgtgagggttggaa

SEQ ID NO: 4449 - DNA, 661 bp, Homo sapiens
  misc_feature [331]..[331]: Chromosome 12, SNP identification no. = rs10778187
  misc_feature [331]..[331]: allele = g, in linkage disequilibrium with rs10778179, respectively
  misc_feature [331]..[331]: n is a, t, c or g
ccaggctttagggtggtgcacttgccagggacctgccctcttcttcccagaattttcctgcctcctttccctatcactactaccgtggcacttaagaaactgaaaaaaattaactatagtcactaacctacattttcttttgtgtaagagctaaattgttactaatgcatgctaaacagtagacactcagatatttgaaaaaatgattgatttatgtgtgtgtatttattaacagaaataattaacatggttcaacactcctagtttacaaagcacattcactgtctcaattttgtttgtcttcacctttaacgcccagggaataagttcngcaaagtattatcaactccattttccagctgaggaaactaagaaggaaaaattttcagtgactgtcttaaggtcacagttagagcttggacctcaagtttgctgactctttttgcaaaactctgttatttttctcttgtgttttgggattgtgtgggctaaatagaataaggacaagaaggtcagttgagagtaatttggcagtctcctgtaagattggaaatatgcaaactccatgaccctgaaactctgcttctaggtatataccctagggaatctccctagaagtgcacaaggacacaagaacaagaatatttattacactattatt

SEQ ID NO: 4450 - DNA, 661 bp, Homo sapiens
  misc_feature [331]..[331]: Chromosome 12, SNP identification no. = rs1902757
  misc_feature [331]..[331]: allele = a, in linkage disequilibrium with rs10778179, respectively
  misc_feature [331]..[331]: n is a, t, c or g
tttaatttagcttgttcaaaattgaagagaaaaatattcatttagaatagaggagtacagcagagtggttatgaagatgagcttcaaagatagaccagggttgaatttcaattctgccaacctaaatgctattaaagtgaagcaggtctccatcctgccggatttatcagagtctttaatatgctgatctgagttgtgagcctttaggataagaatataacattcagaatttctcaaacttatttgaccaaggaatgagcattctttggggcagtacggtaaaaggtgcctttacagataatatgtatttacagggtaatttgaatgatcnattgtctttaggcttgaaaaggtctcccttcatctccttcctgttttatcagacttgtgtttctcttattcctgctatctctaagctttctttgtttacaaagacagagaatccattccctttcctctacaactcaacaaagtggctgctgagaggacagattcttctgagtagcatggtcataggactgagttagtttttttcaagatcagcatgattcatttgatgtgggcaatttcaaggtcttgaaaaattctatctatgctttggtagcatttgtcacttctagctttggccagtatctataaggtgtctgggcacagtattaaa

SEQ ID NO: 4451 - DNA, 661 bp, Homo sapiens
  misc_feature [331]..[331]: Chromosome 12, SNP identification no. = rs703558
  misc_feature [331]..[331]: allele = c, in linkage disequilibrium with rs10778179, respectively
  misc_feature [331]..[331]: n is a, t, c or g
agatgaactgaagaaaacctgtgatattctaatctacctgaagtaagtcaagttgaatttcccagattaatagattgactggagattaaagataaggcctgagaaacatgtcgaattcaaggagcccttctgttcatctcaaaaatagtcctgactcccttccttcctgtccacacataccttcttaaacacgagggaagccttcggaagttttattcttctcttcttatggtagctgctcaccacttggtgtttttgcaccctgcagattgagaggctaggggtggcatgaatcaagtaagccttttcagtgaactcagtgggtgaaaancccatctgccttttatccttgcctgaaagagtccccaagtgactgacctttccagaggggccacatcactctcccgaaacccacgtcattgttctctagcttacggcacattctgtgtccattctgcctccttcctcatcaattcctccaatctttctccacttactgcaccactggtggtctggggtgtgcagcccagatgttttccccaagtgaccagaggattacttttcaagtggcttcacagagcagatgttccctttcacctcccccctcaaccctagtccccaaatgctgaaacctttcccttcttgggagagcacattgtgt

SEQ ID NO: 4452 - DNA, 661 bp, Homo sapiens
  misc_feature [331]..[331]: Chromosome 12, SNP identification no. = rs1350354
  misc_feature [331]..[331]: allele = g, in linkage disequilibrium with rs10778179, respectively
  misc_feature [331]..[331]: n is a, t, c or g
cttcttatggtagctgctcaccacttggtgtttttgcaccctgcagattgagaggctaggggtggcatgaatcaagtaagccttttcagtgaactcagtgggtgaaaaccccatctgccttttatccttgcctgaaagagtccccaagtgactgacctttccagaggggccacatcactctcccgaaacccacgtcattgttctctagcttacggcacattctgtgtccattctgcctccttcctcatcaattcctccaatctttctccacttactgcaccactggtggtctggggtgtgcagcccagatgttttccccaagtgaccagangattacttttcaagtggcttcacagagcagatgttccctttcacctcccccctcaaccctagtccccaaatgctgaaacctttcccttcttgggagagcacattgtgttgctgctgtgtgtttgatcaggagagtacaagcaggaacaagagaatcccacactgacaactgtttggcaggcgagctcctgggcttaagtgtgttcctcctccctttgctcccattacagttgtgagcagatgttcttgactgtccaactggctgatctttctctggccccctcgcaccaaggcttcttccccctcccctgcttcatgctaaccacaactt

SEQ ID NO: 4453 - DNA, 661 bp, Homo sapiens
  misc_feature [331]..[331]: Chromosome 12, SNP identification no. = rs2201521
  misc_feature [331]..[331]: allele = c, in linkage disequilibrium with rs10778179, respectively
  misc_feature [331]..[331]: n is a, t, c or g
cagagttcctctctttttcccttctgccttctgccatgtgacactgtcccctccatcttggtctttccagctttcagaactctgagaaataaatttctattttttataaataaaccagcctcacatattgcattatagtggcacaaacaaactcaaacagtttcctcaaataattcatttttctttgcctactcagtcttcatgcatggcagaaataacctttccattattccataactaacatcattctttgaaggcagctactaagatgaaaaaaaaaaaaaatcaaatggttctcagaaaatcctagcacaatgtaaacagtggaagntacagagaagacacatgttgtaggctgaaattacaaagcaacaattaaaagttggatcactggttaccttgagttagccatgtttaccttagttatgctggatctcaatgctttgtgggaaaaaaagtagaaaatgagccttcatcatggatgtccagaaaattaacagatgacaacggataccctctccatgaggtttgctgcatgccagacactgtgcaaagagctttacgtgcattgtctcatttatttttgccacaactgtgtgaggtcagtactattattctatccatttttttttaggtaagggatcagagatttagagaattt

SEQ ID NO: 4454 - DNA, 661 bp, Homo sapiens
  misc_feature [331]..[331]: Chromosome 12, SNP identification no. = rs7295435
  misc_feature [331]..[331]: allele = a, in linkage disequilibrium with rs10778179, respectively
  misc_feature [331]..[331]: n is a, t, c or g
acaaaatcacaggcaactaactgatttggcctttggggcacagcttgttagttcctattctagagagtgagggtgtcctcctcctattcaaggccaatcctttcactctatcccatgatcctacttcctgctcctttgaggcctcactcattctatgtatatcttttctttcctttcctttttcttcctgtcttccttactacagtcttctcagagtataaacatgttcaaacctatctcattataaattaaagctttcttggcccttgtgatatataattttatgtaccaacttggctgggctatgatgcccaattgtttggtaaaaacnctagcctaaatgttgctgtgaagatatttttcagatggcatcaacatttaaatcagtagactttaagtaaaagatattaccctccataagatgagtgggcatcatttaattagttgaaggtcttaaaagcaaagacacactttgtgaaaaacaatgaattctcctcaagtgtgcaacatagaaaccttgcctgtgcttccattttgctgctctgtgggattctgactgaagactgaaacatcaactcttacctgaattttcagcctcctggcctcctctatacattttgtacttgtcagccctcataatcacatgagacaatgaaatcag

SEQ ID NO: 4455 - DNA, 661 bp, Homo sapiens
  misc_feature [331]..[331]: Chromosome 12, SNP identification no. = rs10860893
  misc_feature [331]..[331]: allele = c, in linkage disequilibrium with rs10778179, respectively
  misc_feature [331]..[331]: n is a, t, c or g
agtggaatgaatgaatgagtatggaagaactaaactatgtatcattaggagagtgaaatgattagaatttcatcacaaagagaaaaaatgctgggtgtaattatgcatattcagattattttgtataatcttgaaaaacctagtttaaataaaaaaggggaaggaagattttgttatttaattcagtattatataagcccatgataaatttgatttttcaaagacctgataatcactttaacataatggactttctttgtaatcttctgcactttattttaagcatttaaacaaattgttctcagaaggagtttagccttcatcagatgancaaagggtacaaacaggacctctgcttgtgcctgggctctgtctgtgggtcctggtgttcctggagcacatccagggaggcaccgcactcagtttgtctagatcggaggagatcatggtacagctgtagctagggagccccagctcagccagaggagctctgcatggtacatgagcaattaccaagctaagaagctgcctgctggaatcctccccaccaaagaatgcttggccactttctgggtgtctgtctggatttggattcccccagttttggaaagcctgccattccaaacactttccctgcttttgccacagagtgaggtaacag

SEQ ID NO: 4456 - DNA, 661 bp, Homo sapiens
  ARK5
  misc_feature [331]..[331]: Chromosome 12, SNP identification no. = rs3741883
  misc_feature [331]..[331]: allele = g, in linkage disequilibrium with rs17038085, respectively
  misc_feature [331]..[331]: n is a, t, c or g
gcttgcttgtagacctgagtcacatcatccatgtctgtgaggagggagaagctgctgtctgccagccggttccggtaccgcttcaggtactggggccggggccggttctggagcccctcaaagtcctggatctggaggaagttttctgcagagacgcagctgcggatgcgctggcgggcagggcgattctcctgcaaatccagcaagtcaaaagagtcgctggacagcacgctgtcatcgctgatgacactggaagggcggctgtagctccgggagaggccctcggcagggacaccaggctctgacagggattccagtgtgggcatttcanggctgaccagggctgggtccatggtgcccgctgagtatttgctgctgtgtttcaagatgcccttcctccggcaggagaggctgtgggaggttaccctggctgggtccggggggctgggggaggggatgctgctgcccatcacatcattactgtccaacagctccgaagactcactgcgctctggggaagagtagtaacctgattctctctgctgggtctttttcaagatgcctttcttgggcatcgtggccgactgcttggggctgagttttcccggcacctctgcctctggtgagcttgggaggagcacgccagtcctgcacaagtcct

SEQ ID NO: 4457 - DNA, 661 bp, Homo sapiens
  ARK5
  misc_feature [331]..[331]: Chromosome 12, SNP identification no. = rs17038085
  misc_feature [331]..[331]: allele = c, t
  misc_feature [331]..[331]: n is a, t, c or g
tggtggctcatgcctgcaatcccagtgtttttcaaggttaaggcagggggactgcttgaggccaggagtttaaggctgctgtgagctatgatggtgccactgcactccagtctatgcgacagagcaagaccctgtctctaaaaataaaagtaacagtagcagcattgctatatgccaggcacggttctgtgagtgctacatatattgatgtagtaaattctcacaacaaccctatctggaagattgcagatagtggaattctaaaattatccttattttgcagataagaaaactgaggcacagggtggtaaactggcttgcctgagacatnggtgaacagctgccttagctgtaaagttctacataaaggggagttattgctgtcaggtggctgacgaggaaatgcactttctgtgtaactcttcgggaagacagcaattccatccaggaaggtacactccataactcctttccggccttggagttgatcgctgtggcttcactcaagacagcctcactcctgagttgccaggaagtgaaggcagggagtggaacaaggagcagaagtgagtggggtcggcttctgtcttcagaggatctaagctcatgctgcctctcttaaaagaaaagaaattcccaccaggaacaatgtgaggaggct

SEQ ID NO: 4458 - DNA, 661 bp, Homo sapiens
  ARK5
  misc_feature [331]..[331]: Chromosome 12, SNP identification no. = rs2730486
  misc_feature [331]..[331]: allele = c, in linkage disequilibrium with rs17038085, respectively
  misc_feature [331]..[331]: n is a, t, c or g
caagtccagttcaaacaattaaatgcgacaagcagttattgatctcctactatatgccgggcattgttcttcctccctgggtaagatgagatgactgagatacagtgtctctcctcaggaagctcatagtctaaaatcatcaccataacaatacttttagcaaccaatacatatttcatatgtattttatatttttgcctgctatcacttaaattcaatctttacaacaactctacaaggtaggtactgttatttacataatttcacagatagggaaactgaggcacagaaaaactaagtaatttgcccaaggtaatccagtggtaaagantagagttgggatttgaacccatgtctgtctgatttcacgagcccaaattcaagtcgctttgcttgatttgctagcaggatcctaaattattttagagctggaactctttgcctggctatttctttgtcactctccaccctgtctcctacttctccctctccaccttcccacccctgaaaccagccatagacctgggaagctgactaaaatggggatggtgcttgctgttgggaaatagcaagtgctggagtttacttgcacggagagtattattgctggctgctgctggagctggagaaagttctcctggcccacagggttcaagtgcct

SEQ ID NO: 4459 - DNA, 661 bp, Homo sapiens
  ARK5
  misc_feature [331]..[331]: Chromosome 12, SNP identification no. = rs1560757
  misc_feature [331]..[331]: allele = c, in linkage disequilibrium with rs17038085, respectively
  misc_feature [331]..[331]: n is a, t, c or g
agaactttctccagctccagcagcagccagcaataatactctccgtgcaagtaaactccagcacttgctatttcccaacagcaagcaccatccccattttagtcagcttcccaggtctatggctggtttcaggggtgggaaggtggagagggagaagtaggagacagggtggagagtgacaaagaaatagccaggcaaagagttccagctctaaaataatttaggatcctgctagcaaatcaagcaaagcgacttgaatttgggctcgtgaaatcagacagacatgggttcaaatcccaactctactctttaccactggattaccttgggnaaattacttagtttttctgtgcctcagtttccctatctgtgaaattatgtaaataacagtacctaccttgtagagttgttgtaaagattgaatttaagtgatagcaggcaaaaatataaaatacatatgaaatatgtattggttgctaaaagtattgttatggtgatgattttagactatgagcttcctgaggagagacactgtatctcagtcatctcatcttacccagggaggaagaacaatgcccggcatatagtaggagatcaataactgcttgtcgcatttaattgtttgaactggacttggagctcaagcaaagagactcttccc

SEQ ID NO: 4460 - DNA, 661 bp, Homo sapiens
  ARK5
  misc_feature [331]..[331]: Chromosome 12, SNP identification no. = rs1427792
  misc_feature [331]..[331]: allele = g, in linkage disequilibrium with rs17038085, respectively
  misc_feature [331]..[331]: n is a, t, c or g
aactacaagccatgtctcagccattattgttattcatcactttggccatgaatttcatctcattcagactttctccagatctgtcacaccctaaacagtcatttactttgaggataacgtgacttgagtccaacagggcatccaaaacagagtcaacttcttcatataaatgatctcaacatggggcctcctggtttgttaaatattatgtttaattgagagtggctctgtaagtaattagagaacagttactcaaatctaaaacccttaactcatgtgaacattatttgacctctctttgttgactcaaaatgtgctcatgatttgaatngtataatattttgtatttcatcatgaggtatcattgtaaatcaccacagaggtgatatttttgatattggaagtgtgtgaacacttggattctgtatgaatgaggctttattagactcattccatcttattacaaaaaccaggaatgcagcaatgtaaaccaaactgctcctgatgtttaaaattaatggaatcaggtgtcttgtagtccacatctttcttctaacagactcggttttgtgcatttctgaattcagaagacctcattgcaggcttgaattagaaaaagattagtagaaatacatgttttcatttctccctctgagcagtg

SEQ ID NO: 4461 - DNA, 661 bp, Homo sapiens
  ARK5
  misc_feature [331]..[331]: Chromosome 12, SNP identification no. = rs7301800
  misc_feature [331]..[331]: allele = g, in linkage disequilibrium with rs17038085, respectively
  misc_feature [331]..[331]: n is a, t, c or g
aacaagctcacttatgctacagagaatgcgagagaggacaacggagatgtcgccaggcagaggatcgactgatgggtcagaacacaaatcagccaattcagcatcacgaggcgtggggcgtgctgtcccgccaggtggaaaatggtgtgtgtcaccaccactgttcctggacacgcctttgtcatgctaagggaaatgtggttcccttttctgaggaccccactttccttgtcaagatcatttctcataccctctcccagaacggctttcctgtagacaggatgatgggtaacaacaaacacaaccaataatttattaaccactggatacngaccaggtagccggccctgacagagctactctgaccccaaaatgggtgctcaatcttgtcatctctttataacttcccatctcaggcaaataaaacccaaagcttttaatgtggcccaccaagtcgtgcacgatcccatgggcccctctcagccctactacacacccattccatgtatttatttattctgtctcccccagtcaaatgtaaaagggggttgtcctgtttcactcactggtgtatcctcagcacccagaacagtatttggcacagagtaacatagtaggagctcagctaatatttattaaatgagtaaactcaaactacata

SEQ ID NO: 4462 - DNA, 661 bp, Homo sapiens
  ARK5
  misc_feature [331]..[331]: Chromosome 12, SNP identification no. = rs2436596
  misc_feature [331]..[331]: allele = a, in linkage disequilibrium with rs17038085, respectively
  misc_feature [331]..[331]: n is a, t, c or g
tgtcctgtttcactcactggtgtatcctcagcacccagaacagtatttggcacagagtaacatagtaggagctcagctaatatttattaaatgagtaaactcaaactacataaaggcatttctgaacattaataataaataacaatatagcacttactgtgcaccaagtttgtgtgtaaggttttaagtacctcacatgtactgactcatttaaaccctatgacaaataatcagggaaatatctgtaattttaccatttgaaagatgaaggcactgaggcctagggaggttaagaaactggcacggcctgcaatcaggcagtttggcgtcnaagatcaagtgcagaactaccagatgagatggcctcccaaagagctggctggaatcagcagggctccagtccccagcatggatggggaactaatgccgcaggttgcagggccgctgctactatgatctcaagccggttcccggccaccaggtccagccccttctcactcaacctccacaccaccaaggaaacagtcttcccaaatgcttgtaaatgcttctttctacccaatgctgatgctctctagccgttatgttcaaagtcagggttccaggcagatggccagggacccatgcaaggaggcagggagaagggaggccacaaatgaca

SEQ ID NO: 4463 - DNA, 661 bp, Homo sapiens
  ARK5
  misc_feature [331]..[331]: Chromosome 12, SNP identification no. = rs11112867
  misc_feature [331]..[331]: allele = g, in linkage disequilibrium with rs17038085, respectively
  misc_feature [331]..[331]: n is a, t, c or g
cattttacagatgtgattactgaggcactgagaagcctaccatcttaccccaagtgttgtgcctaggtcacagtggaggactggaggctgaagctcaagacctcctgatgtgagacctcaagtcttccttaactccctaaaacctgtcctaagggtttcaccaactgaagccccagctccctcctgaggccttgatagaaattatttctagtaacctaaagaccttcctcacactgctatgcatctttaaagtgacaagcaagagccttgagggcttctcttctccttaaagcctccagcccggtctctactgaggccaacttcacgttgntaactaaatattcttccgttaaggtttgtctctgatcttctctttgccagggggatggtttcctgttctccattcgtcctgtctgattcccaaggccacacagggcatggtgctggtgaagaagtcaggtttctccatgtgggacgccagcaaccacagactgcctctcaaataaagaacctggaaccttcatgctgagaatgcactctctttcccttcctgataaagaaggctcctgctctgggccaagaaatcccaaaacacaatagtgttctcagggcacaggattgtatggctccacaccctacaggtcaatccttcaccatggcc

SEQ ID NO: 4464 - DNA, 661 bp, Homo sapiens
  ARK5
  misc_feature [331]..[331]: Chromosome 12, SNP identification no. = rs11112869
  misc_feature [331]..[331]: allele = t, in linkage disequilibrium with rs17038085, respectively
  misc_feature [331]..[331]: n is a, t, c or g
agtagactagtggttctcaaatttgttgaaacacagattgctgagccccacccagagagtttcagattcagcaggtcctgggtgaagcctgagaatctgtatttctaataatctcaagtgatgctcatgccactagcccaggcactttgagaagcactgtaagaggtgtttgtgatgtaaataaaagatagaatggataaaaatttcccttaaaaatcctatcaccaagggctccaaaaatgagccttcaaatgaccaggataaaagaaatatattaccaacatttacttctagataagaggcaaaaatagaagcagcagaaaaaaagaanggcaaaaaaagatcagggaaccagatgaaaaacgaaaactatcagaaaaactttagggacaccactggttggtttccttttagcccaacctgataacttcttataatctgaccacgaattaaaaataagttcatttttctttttttttttttttaaacagagtctcactctgtcacccaggctggaatgcagtggcacgatctcagctcactgcaacctccgtctccctagctcaagtgattcacgtgcctcagcctcctgagtagctgggactacaggcatgcgccaccacacctgactactttttgtatttttagtagagacgggttt

SEQ ID NO: 4465 - DNA, 661 bp, Homo sapiens
  ARK5
  misc_feature [331]..[331]: Chromosome 12, SNP identification no. = rs3782691
  misc_feature [331]..[331]: allele = a, in linkage disequilibrium with rs17038085, respectively
  misc_feature [331]..[331]: n is a, t, c or g
cagctaaaccatccttctggattataaaggcatacagtcatctggagcaaagaaagtcctcattatcagcagcccacggccacaccttgcctatcacacagtcaaccccagccagcctcagcaggaatatattcacttttaggagcacgtgctacttctgacttgtaccagctctccaccaagcactacaaacaaaaacatttctaaaatgcatcagtccatctatgactcaacaagaactgggtagctgttatgactgtttttgctatgtattgacctcccaaaagacaggttatgtctgactagcagctcctgggatttctcctttgcngtccttaccccagttgtgattaaatcagcatttgtgtctttacttgactctacactggtagggatcttattcactgctttatttaacttccagtccttaacaccatgcttggcatacggtagacccgggaaaacatttagtgtaggcaggtaggcaggtagataaaaaacgaaggaaagatgaagggaaggaggaaaggagggaagctagagggaggggagggttgctgttattaattgatgcaagctcagaccagagaggtggtagcagaactggggaaaaaaaaagggggaaccaccccagttaaataatactgccacgacaagcata

SEQ ID NO: 4466 - DNA, 661 bp, Homo sapiens
  misc_feature [331]..[331]: Chromosome 12, SNP identification no. = rs7315438
  misc_feature [331]..[331]: allele = t, in linkage disequilibrium with rs10850526, respectively
  misc_feature [331]..[331]: n is a, t, c or g
ctgccaggagcttataaaccaccctttctgagacggctctgggggtcaagagatggggctagatttatctgaatgggtcctggcctggtggtctgctttgcaccaaacatgcaagcagggatctcagtggaaccagccccttttgcacttgaataaattcaggagcgatgggagaagaacagtgacatagggtttatttgtgtattcatttttctgaccaggggatgcatccagaaagtatcagtagttaaacaacaagggggctcaggagttgccatgcgtcagcatctcagaaactgcatctggggcaaagccactgggccaagaaggncaacaaggtggtgccaaaagcacattcattgggcagctttgcttcatgaaagcagctcagatccacattcaagccaatttgcccagacaacacttccccccacaccaactccccaaaagggatatttctttttttttttttctttgagatggagttgcccaggatgcccaggctggagtgcagtggtgcgatctcagctcactacaacctccacctacagtgttcaagcaatcctcctgcctcagcctcccaagtagctgggattacaggcacccgccaccatgcctagctaagttttgtatttttagtaaagacagggtttcaccatgt

SEQ ID NO: 4467 - DNA, 661 bp, Homo sapiens
  misc_feature [331]..[331]: Chromosome 12, SNP identification no. = rs7304462
  misc_feature [331]..[331]: allele = a, in linkage disequilibrium with rs10850526, respectively
  misc_feature [331]..[331]: n is a, t, c or g
cttccttgtctttgcttcacagataagcccctctgagtcttcatcaatgtactcttcctcatacttcagtatattttctgtgactttatcaagaagctgttttgccactttccctcgtatttcaagagtgcacaaacacctgcagggtatgttttatttgctgtaaaaacaaaactctgaagtctcagtggtttatcacaataaaactaaatacaatgcgagttggtagagggctctgttccatgcagtcattcaggggcccagaatccttccacttagtagctctgccttttctatgtctttaaagtcttcttcttttggcaagtagatnagaagagagagcatgaaggatgatgtgggaggtttttaggggccaggcctggaagttgggaatatcactaatgcccaccatccattagccataacttagtcacagggtcttactcaactcccagagacactggggaacataatgtagcttgtgcccaggaggcgaaagaagagaatttttgtgaacatatagcaggctctgccacaaagtctcaagaatacacagacggggaaaagagatgtccttcttctgtaaaagttccaaaattaagtattttcagagctgtgcacctcacccctagccatgagtaatctctctacaacacaccag

SEQ ID NO: 4468 - DNA, 661 bp, Homo sapiens
  misc_feature [331]..[331]: Chromosome 12, SNP identification no. = rs721218
  misc_feature [331]..[331]: allele = g, in linkage disequilibrium with rs10850526, respectively
  misc_feature [331]..[331]: n is a, t, c or g
ttttcttatctgtaaattggggattaaatgacaccaacctcgtcgagttgttgtgaagtataattgggttaattatgcataacatttcagcagagcgacaggcacaaactaaagtgctgtgtgctgtttgctattatgatttcatagtttcttcctctgcagatattccctgggacccaaacctgaagcccctgggctgcccttcctcagcggggctgactggagcagttactgatggcaccagcttaaagaggaaatggagagtgtgtttgcgtgttttctgccatgaaataggcatcctgagacaatctcttcataactgatgtagccnagccctctgtactgaaattgctggactcacacgaggcccagatgtggtttaaagagcatgtgggggaaatttccgtaggagcaacacagatctctctattcagagtttttcttgtgggcagcttgcatttactcattctttcattccagaagtatttatttagcccctgctatgtgccaggcattgtgataatagttggaatgcagaggtgaattaaagagtatgggcttgtctatataaataaataaatatatatgtatatgtgtgtgtataacacctattatatatattatgtattaggtgtgtgttgtatatatatgtttatatatg

SEQ ID NO: 4469 - DNA, 661 bp, Homo sapiens
  misc_feature [331]..[331]: Chromosome 12, SNP identification no. = rs721219
  misc_feature [331]..[331]: allele = c, in linkage disequilibrium with rs10850526, respectively
  misc_feature [331]..[331]: n is a, t, c or g
tctgtaaattggggattaaatgacaccaacctcgtcgagttgttgtgaagtataattgggttaattatgcataacatttcagcagagcgacaggcacaaactaaagtgctgtgtgctgtttgctattatgatttcatagtttcttcctctgcagatattccctgggacccaaacctgaagcccctgggctgcccttcctcagcggggctgactggagcagttactgatggcaccagcttaaagaggaaatggagagtgtgtttgcgtgttttctgccatgaaataggcatcctgagacaatctcttcataactgatgtagcccagccctcngtactgaaattgctggactcacacgaggcccagatgtggtttaaagagcatgtgggggaaatttccgtaggagcaacacagatctctctattcagagtttttcttgtgggcagcttgcatttactcattctttcattccagaagtatttatttagcccctgctatgtgccaggcattgtgataatagttggaatgcagaggtgaattaaagagtatgggcttgtctatataaataaataaatatatatgtatatgtgtgtgtataacacctattatatatattatgtattaggtgtgtgttgtatatatatgtttatatatgtgtgtgtt

SEQ ID NO: 4470 - DNA, 661 bp, Homo sapiens
  misc_feature [331]..[331]: Chromosome 12, SNP identification no. = rs7978535
  misc_feature [331]..[331]: allele = a, in linkage disequilibrium with rs10850526, respectively
  misc_feature [331]..[331]: n is a, t, c or g
ctgactggagcagttactgatggcaccagcttaaagaggaaatggagagtgtgtttgcgtgttttctgccatgaaataggcatcctgagacaatctcttcataactgatgtagcccagccctctgtactgaaattgctggactcacacgaggcccagatgtggtttaaagagcatgtgggggaaatttccgtaggagcaacacagatctctctattcagagtttttcttgtgggcagcttgcatttactcattctttcattccagaagtatttatttagcccctgctatgtgccaggcattgtgataatagttggaatgcagaggtgaatnaaagagtatgggcttgtctatataaataaataaatatatatgtatatgtgtgtgtataacacctattatatatattatgtattaggtgtgtgttgtatatatatgtttatatatgtgtgtgtttatgtataagtatatatgtgataagagtttataatcctatatagagacagatgtattaaaatggatttttttttttttgagacagagtcttactctgtcatcaaagctggagtgcagtggtgcaatctaggctcacagtgacctacacctcccatgttcaaacgattctcctgcctcagcctcccaagtagcagggattacaggcac

SEQ ID NO: 4471 - DNA, 661 bp, Homo sapiens
  misc_feature [331]..[331]: Chromosome 12, SNP identification no. = rs4767320
  misc_feature [331]..[331]: allele = c, in linkage disequilibrium with rs10850526, respectively
  misc_feature [331]..[331]: n is a, t, c or g
tgcagttttgataactcaaagagtgattgaactcatttcagccatgtcctcaaagttctgaccccagaggccacctaagttcgccattttctgcaagtcttatggttctaaaaagttatctcttataatgcttgaaaagaaggtttaagaattttccagtgtatgatggttccgaacaagcagagtcatttctcaagaattgtttttgcaaggttgtttacgactggctttctcacttgtttgcttccttctaacacaattttctgaataccggccatgtgccagatattatattatcagccacggtataccagatatacatttatggctncctgaaattcctgacctagtggagaataaagattaatctaccagaaactataatacactgtgacaagttacatgattagagagaaaatacagttgggattttaaacgaaccaccacatgggcttgcttttgctacacagcaaatatctctcaaattcttcattcatttggagtcagcaaatatttggagaatacgaaatcacttcattagtagctgaatgcaacctacaaggtaatccatataacacactccaaggccaatcatcaaattcatttgaatattccacttcttggggtttcgtgctcatcaattccctacatgtatagatgg

SEQ ID NO: 4472 - DNA, 661 bp, Homo sapiens
  misc_feature [331]..[331]: Chromosome 12, SNP identification no. = rs6490020
  misc_feature [331]..[331]: allele = c, in linkage disequilibrium with rs10850526, respectively
  misc_feature [331]..[331]: n is a, t, c or g
gctttccttcaaaatgacaactcatccattcttctgtctattcaggcattcattcactgcccaggctgcaaccatctacaccccaagtataacaacaatgatacaacaccagcagtagtgggtaacattttattgagcccttactgtggaccaaatagattatcttaagtcctttacttgttattaaccaatttcattctcacaacaacctacaaagggtgtgctggcatcctcattgcacggttgaggaaaccgaggtacagagagctaagtgacttgtccaagatcacacagctaagaagtgggagaagcaggatgtgaactcaggcangttggctctagatccccttcctccaccctccttgaccagtgtgctctatgcctctaggcccctggcatgtatttgacattagtaatattctaccctgccccctacattggtcctcccccaacacttcctctacacaagtatttctaattgagtgctacactcttcacagttttcggatgaattctctgaatccttcttaacacaacactccatgtaaccatcatcaattaattagaattggcacggtgataaagccagtttgacaactgaaccagttgtgactgtttgattgcaagcaacagtagctgactctggtagcataagccaaaa

SEQ ID NO: 4473 - DNA, 661 bp, Homo sapiens
  misc_feature [331]..[331]: Chromosome 12, SNP identification no. = rs10850519
  misc_feature [331]..[331]: allele = g, in linkage disequilibrium with rs10850526, respectively
  misc_feature [331]..[331]: n is a, t, c or g
accaatccataaggatataaaatagactggtggttgccaagggcagggagcaggagggaatgggagtggctgcttcatgggtgcaggattttcctttggggtgatgaaagcgttttggaacaagatagagatgacaattgcacaacggtgtaaatataccaagtgccactaaattattcgctttaagatggtttaatttatggtatgtgagtttcacctccattttttaaaagtcagcttatttggctgctataactagcccacactttctcacggggtactttagtcttccattaaccactttcagagaaccactgggtactgatggttnactgggtgcaagcatccaacatgtgtattagatgcaactttattttgccggcatccatggggtcccatcattttttgttggataacctgcacagctaaaaatctggaatcccgaagaccaaagttttatgctccctttattcggcacccttttagaggatgtcttctttcttgcagtgttttagtgaaacctttggatttgattccaagcagaatgcaagcaggcactgcttggaaacagtaagatcagtaaagtagatgatacatttttaggttccacaccaaacccacaccagagtcctttcaacttagaacctggtaaaaaggatta

SEQ ID NO: 4474 - DNA, 661 bp, Homo sapiens
  misc_feature [331]..[331]: Chromosome 12, SNP identification no. = rs7135643
  misc_feature [331]..[331]: allele = c, in linkage disequilibrium with rs10850526, respectively
  misc_feature [331]..[331]: n is a, t, c or g
aagaccaaagttttatgctccctttattcggcacccttttagaggatgtcttctttcttgcagtgttttagtgaaacctttggatttgattccaagcagaatgcaagcaggcactgcttggaaacagtaagatcagtaaagtagatgatacatttttaggttccacaccaaacccacaccagagtcctttcaacttagaacctggtaaaaaggattagctgtttgtcatccgcaaggccacacgaaagctactctgtctgttaaaagacacctgtatgcacaccctggtccaaggaccctatactctctgccctttgataaaaccagatcngcttatatggatgtttggcaagggaataacaaacaactgctaagagaataagagaggtttactgggggggaggggagtgaggctagacacgagcactttgcattgtatatcatctgcacggctgatagagaatgaattatttctttccaattcggcgccatcatccatcacagtcaattttcagctcatctggaaggtttcaagaagcccagaatgggatcagtgctacaaaacagtcacagcagctagccttctaaatggattacagtgaataaaaatataaaaatagttcccagtttagaggaaattactctgctacaccctacactc

SEQ ID NO: 4475 - DNA, 661 bp, Homo sapiens
  misc_feature [331]..[331]: Chromosome 12, SNP identification no. = rs6490021
  misc_feature [331]..[331]: allele = c, in linkage disequilibrium with rs10850526, respectively
  misc_feature [331]..[331]: n is a, t, c or g
ttttagaggatgtcttctttcttgcagtgttttagtgaaacctttggatttgattccaagcagaatgcaagcaggcactgcttggaaacagtaagatcagtaaagtagatgatacatttttaggttccacaccaaacccacaccagagtcctttcaacttagaacctggtaaaaaggattagctgtttgtcatccgcaaggccacacgaaagctactctgtctgttaaaagacacctgtatgcacaccctggtccaaggaccctatactctctgccctttgataaaaccagatctgcttatatggatgtttggcaagggaataacaaacanctgctaagagaataagagaggtttactgggggggaggggagtgaggctagacacgagcactttgcattgtatatcatctgcacggctgatagagaatgaattatttctttccaattcggcgccatcatccatcacagtcaattttcagctcatctggaaggtttcaagaagcccagaatgggatcagtgctacaaaacagtcacagcagctagccttctaaatggattacagtgaataaaaatataaaaatagttcccagtttagaggaaattactctgctacaccctacactcaaatttcctcatttaatcctcacaacaaacctatga

SEQ ID NO: 4476 - DNA, 661 bp, Homo sapiens
  misc_feature [331]..[331]: Chromosome 12, SNP identification no. = rs4767327
  misc_feature [331]..[331]: allele = t, in linkage disequilibrium with rs10850526, respectively
  misc_feature [331]..[331]: n is a, t, c or g
ctgccctttgataaaaccagatctgcttatatggatgtttggcaagggaataacaaacaactgctaagagaataagagaggtttactgggggggaggggagtgaggctagacacgagcactttgcattgtatatcatctgcacggctgatagagaatgaattatttctttccaattcggcgccatcatccatcacagtcaattttcagctcatctggaaggtttcaagaagcccagaatgggatcagtgctacaaaacagtcacagcagctagccttctaaatggattacagtgaataaaaatataaaaatagttcccagtttagaggaanttactctgctacaccctacactcaaatttcctcatttaatcctcacaacaaacctatgatgtaggaaatttaactgtttccattttgcagatgagaaaaccaaggctctgagaggtcaaaggaagggtctgtggtcacacaggtagaaagtggcaggtctaggaaatgaacatagattgcatcaatgccaggtcctgcagctcagttgcgatgctaatggtacaagctcagtaagttctacacttctgcctacactctctcagcctgaaattcactttgtttttagtggtgaaccgaaagtgcgtcagaaaagggaattgctcccttggg

SEQ ID NO: 4477 - DNA, 661 bp, Homo sapiens
  misc_feature [331]..[331]: Chromosome 12, SNP identification no. = rs4767329
  misc_feature [331]..[331]: allele = a, in linkage disequilibrium with rs10850526, respectively
  misc_feature [331]..[331]: n is a, t, c or g
gctacaaaacagtcacagcagctagccttctaaatggattacagtgaataaaaatataaaaatagttcccagtttagaggaaattactctgctacaccctacactcaaatttcctcatttaatcctcacaacaaacctatgatgtaggaaatttaactgtttccattttgcagatgagaaaaccaaggctctgagaggtcaaaggaagggtctgtggtcacacaggtagaaagtggcaggtctaggaaatgaacatagattgcatcaatgccaggtcctgcagctcagttgcgatgctaatggtacaagctcagtaagttctacacttctncctacactctctcagcctgaaattcactttgtttttagtggtgaaccgaaagtgcgtcagaaaagggaattgctcccttggggtcttttgtcttttccgtctttcttagacttattctcatagctaagcataaaggtgacttagaagacacatgatagagacttggagacaaaggaaaatatacgttttcagtgtattgaacttggttcttcccagtagcactagttcatcccgaaagtcctggcatttgcaggcaaagggaatccactggagagaagaagtgagcatgtaaggctgagagaaagaggcaggcttcctcttccctgggtt

SEQ ID NO: 4478 - DNA, 661 bp, Homo sapiens
  misc_feature [331]..[331]: Chromosome 12, SNP identification no. = rs12304729
  misc_feature [331]..[331]: allele = a, in linkage disequilibrium with rs10850526, respectively
  misc_feature [331]..[331]: n is a, t, c or g
gcaaagggaatccactggagagaagaagtgagcatgtaaggctgagagaaagaggcaggcttcctcttccctgggttaactgcccgggacctattggagaggttgggagcaaggaatatttgttcattctataaatattcatccgtgcctcctctggcctggccctctgccatgtgccaaggtgtaacaacaaataagaaaagacacagtccctaccttcagtggactgcacactattggaaatgtagattaaataacaattgtaaattctggctgtgatgagtgttatgaagaaaacatacaagatgccataagaacatttaaaaagagncagaatcagagcaagtataggaggaagaaggctgcaagtgacagaaaactccaacatgacagtggcttaaacaaggtagtttaggctgggcacagtggctcaatcctgtaatcacagcattttgggaggccgaggtgagcacatcatctgaggttatgagtttgagaccagcctggccaacatagtaaaaccccgtctctactaaaaatacaaaaattagctgggcatggtggcaggtgcctataatcccagctatttgggaggctgaggcaggagaatcgcttgaacccaggaggcagaggttgcagtgagcaccattacactccagcc

SEQ ID NO: 4479 - DNA, 661 bp, Homo sapiens
  misc_feature [331]..[331]: Chromosome 12, SNP identification no. = rs7961066
  misc_feature [331]..[331]: allele = g, in linkage disequilibrium with rs10850526, respectively
  misc_feature [331]..[331]: n is a, t, c or g
gtgagcacatcatctgaggttatgagtttgagaccagcctggccaacatagtaaaaccccgtctctactaaaaatacaaaaattagctgggcatggtggcaggtgcctataatcccagctatttgggaggctgaggcaggagaatcgcttgaacccaggaggcagaggttgcagtgagcaccattacactccagcctgggcaacaagagtgaaactctgtctcaaaaaaataaaacaaaacaaaaaaaggtagaagcttatctcttcagcatttaacagaagttgagagatggcagatcaaggctgacatggcaggtgagtggggacatgngggacccaagactcaatttttgccctactttctggcacataatctagtctcatggctgcctcctggttcaaaatggctgctagagtgccggccatcacattcaacttgcagcttaaagcagaaggaaaggcagaggggcaaaataggcttctcccagccagatcaacaccccataaactgtcttcccagggctgggtgtggtagctcacgcctgtaatcccagcactttaggaggctgaggcaggcagatcacctgaggtcaggagtttgagaccagcctggccaacatagtgaaacctcatctctactaaaaatacaaaagttagccag

SEQ ID NO: 4480 - DNA, 661 bp, Homo sapiens
  misc_feature [331]..[331]: Chromosome 12, SNP identification no. = rs4767331
  misc_feature [331]..[331]: allele = c, in linkage disequilibrium with rs10850526, respectively
  misc_feature [331]..[331]: n is a, t, c or g
aagagataaggcatacttgtgaggacatcagaggccataatcaataccccacatcacactcagaaggaaaccccccggggccaagagggggtctggtgtgcttggaaggccaggaaaatatccatggtgcctggctgctggacggagtttcagggaggcaatttctcttagagctgtatgaagagaagaatcaaaaggaacctgagttgttaggaaaggtgcttagagagggagaaggattttagctatagcaaaaccactaactgctaactgtgagcttactgtgcatgaggcaccctgctttgctcttaacatgtaatattgtgctgantcctggatagagcaccttgaggatgtcattttatgttcccccatttacagatgaaaagtttcatgtaggtggcaaagtggcttgcccaaggtcatgcagctagtaagtggtacagataggacaagttatgatagataagcaggaacagaaaacgcatttcgtgtaacagggatctatgagcgaaaaccaagaggctgaaagtgcatggtatagtgaagccatgaagaaaccaattcaaatagatcaggtggttcatggaaggggatgggataggaaaaagtaagtccaaaccacataatggaaagcattgaattctggggtaagatcctt

SEQ ID NO: 4481 - DNA, 661 bp, Homo sapiens
  misc_feature [331]..[331]: Chromosome 12, SNP identification no. = rs4767332
  misc_feature [331]..[331]: allele = a, in linkage disequilibrium with rs10850526, respectively
  misc_feature [331]..[331]: n is a, t, c or g
tgaatcctggatagagcaccttgaggatgtcattttatgttcccccatttacagatgaaaagtttcatgtaggtggcaaagtggcttgcccaaggtcatgcagctagtaagtggtacagataggacaagttatgatagataagcaggaacagaaaacgcatttcgtgtaacagggatctatgagcgaaaaccaagaggctgaaagtgcatggtatagtgaagccatgaagaaaccaattcaaatagatcaggtggttcatggaaggggatgggataggaaaaagtaagtccaaaccacataatggaaagcattgaattctggggtaagatncttagactttactccaaaggtagcaagaagccatgggaggttattgagcaggattgtgacacaataaaggaagacttggggacatttttcctgagcaggctgtttaaaatggattctccaagttattattggccccattgagcagatgaggaaactgaggttacaagaatttcatgagctttctcaggtcatagagctaggaagtggcaagagcagatttgaacctcggttttttgtttatcccaccgcatggtaggcaatggtatttccaagatttaaaaagtcacacacattaagtcaaaatgtcattaaacccttggcatagcacat

SEQ ID NO: 4482 - DNA, 661 bp, Homo sapiens
  misc_feature [331]..[331]: Chromosome 12, SNP identification no. = rs10850521
  misc_feature [331]..[331]: allele = t, in linkage disequilibrium with rs10850526, respectively
  misc_feature [331]..[331]: n is a, t, c or g
tcaggtggttcatggaaggggatgggataggaaaaagtaagtccaaaccacataatggaaagcattgaattctggggtaagatccttagactttactccaaaggtagcaagaagccatgggaggttattgagcaggattgtgacacaataaaggaagacttggggacatttttcctgagcaggctgtttaaaatggattctccaagttattattggccccattgagcagatgaggaaactgaggttacaagaatttcatgagctttctcaggtcatagagctaggaagtggcaagagcagatttgaacctcggttttttgtttatcccacngcatggtaggcaatggtatttccaagatttaaaaagtcacacacattaagtcaaaatgtcattaaacccttggcatagcacatcatccaggttaccatgatgtcaggcgaaggacgatcaagaagaagccagggttttagtagtggttgcaggagcaggcctttttccaggggcctacatgtggggcacacgtgtaggttaaattctgagggcaactttctgagggctacctgcatgcatctttgccaagactgatccctcagtgacctatggtcttacctgcctctcatccctggggaggaggaagaagcagaaagatgtctccatttg

SEQ ID NO: 4483 - DNA, 661 bp, Homo sapiens
  misc_feature [331]..[331]: Chromosome 12, SNP identification no. = rs10850522
  misc_feature [331]..[331]: allele = a, in linkage disequilibrium with rs10850526, respectively
  misc_feature [331]..[331]: n is a, t, c or g
aaggggatgggataggaaaaagtaagtccaaaccacataatggaaagcattgaattctggggtaagatccttagactttactccaaaggtagcaagaagccatgggaggttattgagcaggattgtgacacaataaaggaagacttggggacatttttcctgagcaggctgtttaaaatggattctccaagttattattggccccattgagcagatgaggaaactgaggttacaagaatttcatgagctttctcaggtcatagagctaggaagtggcaagagcagatttgaacctcggttttttgtttatcccaccgcatggtaggcaatngtatttccaagatttaaaaagtcacacacattaagtcaaaatgtcattaaacccttggcatagcacatcatccaggttaccatgatgtcaggcgaaggacgatcaagaagaagccagggttttagtagtggttgcaggagcaggcctttttccaggggcctacatgtggggcacacgtgtaggttaaattctgagggcaactttctgagggctacctgcatgcatctttgccaagactgatccctcagtgacctatggtcttacctgcctctcatccctggggaggaggaagaagcagaaagatgtctccatttgtcaccctggtaaagc

SEQ ID NO: 4484 - DNA, 661 bp, Homo sapiens
  misc_feature [331]..[331]: Chromosome 12, SNP identification no. = rs10850523
  misc_feature [331]..[331]: allele = t, in linkage disequilibrium with rs10850526, respectively
  misc_feature [331]..[331]: n is a, t, c or g
aagaagccatgggaggttattgagcaggattgtgacacaataaaggaagacttggggacatttttcctgagcaggctgtttaaaatggattctccaagttattattggccccattgagcagatgaggaaactgaggttacaagaatttcatgagctttctcaggtcatagagctaggaagtggcaagagcagatttgaacctcggttttttgtttatcccaccgcatggtaggcaatggtatttccaagatttaaaaagtcacacacattaagtcaaaatgtcattaaacccttggcatagcacatcatccaggttaccatgatgtcaggngaaggacgatcaagaagaagccagggttttagtagtggttgcaggagcaggcctttttccaggggcctacatgtggggcacacgtgtaggttaaattctgagggcaactttctgagggctacctgcatgcatctttgccaagactgatccctcagtgacctatggtcttacctgcctctcatccctggggaggaggaagaagcagaaagatgtctccatttgtcaccctggtaaagcaagtagggatgtgaaagctccaagaccggggagggccccagaggccagcattctaaaaaataattgctctattatttaagcaaagccacttaa

SEQ ID NO: 4485 - DNA, 661 bp, Homo sapiens
  misc_feature [331]..[331]: Chromosome 12, SNP identification no. = rs10850524
  misc_feature [331]..[331]: allele = c, in linkage disequilibrium with rs10850526, respectively
  misc_feature [331]..[331]: n is a, t, c or g
acacaataaaggaagacttggggacatttttcctgagcaggctgtttaaaatggattctccaagttattattggccccattgagcagatgaggaaactgaggttacaagaatttcatgagctttctcaggtcatagagctaggaagtggcaagagcagatttgaacctcggttttttgtttatcccaccgcatggtaggcaatggtatttccaagatttaaaaagtcacacacattaagtcaaaatgtcattaaacccttggcatagcacatcatccaggttaccatgatgtcaggcgaaggacgatcaagaagaagccagggttttagtngtggttgcaggagcaggcctttttccaggggcctacatgtggggcacacgtgtaggttaaattctgagggcaactttctgagggctacctgcatgcatctttgccaagactgatccctcagtgacctatggtcttacctgcctctcatccctggggaggaggaagaagcagaaagatgtctccatttgtcaccctggtaaagcaagtagggatgtgaaagctccaagaccggggagggccccagaggccagcattctaaaaaataattgctctattatttaagcaaagccacttaatagctcattaaaggggcaaagacgattattgccc

SEQ ID NO: 4486 - DNA, 661 bp, Homo sapiens
  misc_feature [331]..[331]: Chromosome 12, SNP identification no. = rs7969684
  misc_feature [331]..[331]: allele = t, in linkage disequilibrium with rs10850526, respectively
  misc_feature [331]..[331]: n is a, t, c or g
ctcagtgacctatggtcttacctgcctctcatccctggggaggaggaagaagcagaaagatgtctccatttgtcaccctggtaaagcaagtagggatgtgaaagctccaagaccggggagggccccagaggccagcattctaaaaaataattgctctattatttaagcaaagccacttaatagctcattaaaggggcaaagacgattattgcccagatttttatctggggaatctcatagaaatgccagagtcatatttccaggtaaccgaagaatctgaaaagtacagcaaaagctgaatcacaaaaatccaggtcactttggctgacgnctttttcccctcttgaggggttcactgtacttgggaatgaccataaatgtagccaaagttatcgagcatttcatattcaacaggaattgtactaaatgtgtgcccatcatgtcttgaggcttcgcaacagccctacacagaaggtgcatttagtagaccattttacaggtgaggaaactgagacttgaaaaggtgatgtcatcacttgccaaaagtaactaggctagtaggtagcagaactgggactcaaaagtagatggtttgtccattctgttctcaacagatcttagcttcaaagcccagtcaaggggatcttcaataaattctggg

SEQ ID NO: 4487 - DNA, 661 bp, Homo sapiens
  misc_feature [331]..[331]: Chromosome 12, SNP identification no. = rs1498754
  misc_feature [331]..[331]: allele = c, in linkage disequilibrium with rs10850526, respectively
  misc_feature [331]..[331]: n is a, t, c or g
gttacccttttccacatccatatcagtttggctgttctttgttgtcatgttccttggtaatttcagccctggatgacagaaagctatgatcacctatcccccagaatttattgaagatccccttgactgggctttgaagctaagatctgttgagaacagaatggacaaaccatctacttttgagtcccagttctgctacctactagcctagttacttttggcaagtgatgacatcaccttttcaagtctcagtttcctcacctgtaaaatggtctactaaatgcaccttctgtgtagggctgttgcgaagcctcaagacatgatgggcacncatttagtacaattcctgttgaatatgaaatgctcgataactttggctacatttatggtcattcccaagtacagtgaacccctcaagaggggaaaaagtcgtcagccaaagtgacctggatttttgtgattcagcttttgctgtacttttcagattcttcggttacctggaaatatgactctggcatttctatgagattccccagataaaaatctgggcaataatcgtctttgcccctttaatgagctattaagtggctttgcttaaataatagagcaattattttttagaatgctggcctctggggccctccccggtcttggagctttc

SEQ ID NO: 4488 - DNA, 661 bp, Homo sapiens
  misc_feature [331]..[331]: Chromosome 12, SNP identification no. = rs7299936
  misc_feature [331]..[331]: allele = a, in linkage disequilibrium with rs10850526, respectively
  misc_feature [331]..[331]: n is a, t, c or g
actacccatgttgcttacaaccttggctcattcattgcagactgggcttaaagctggagagacaggagagtagagaaatatacacagataggtagacactatttgctgagcactaacaatgtgctaggcacagtgtcaaagactttatgccaaggtaagcattgccagctcatattatagaggagaaagctgaaactcagagacaggaggtcagcggccctcatcccccagccagtcaactgcaaagcagagattcaggtctccaggtctcctgggcaggctgcaggtctgtttgctaagcccacaaagggttaagcggttgcccttgacnctcaactctcactaggcaggaagaggataaaggagggatgcccattccatgtgtatagacctagaatccgcaaactaaggcctgagggccaaatccacttactgcctgtttttgtatgtcccgtgagctaagaatagtttccacctttctagagagttgataacaataataataagaataatattttggctgggcacagtggctcacacctgtaatcctagcacttcgggaggccaaggtgggcagatcacctgaggtcaggagtttgagaccaggctggccaacatggcaaaccctgtctctactaaaaatacaaaagttagccagtca

SEQ ID NO: 4489 - DNA, 661 bp, Homo sapiens
  misc_feature [331]..[331]: Chromosome 12, SNP identification no. = rs10850526
  misc_feature [331]..[331]: allele = a, g
  misc_feature [331]..[331]: n is a, t, c or g
cactgcacttcagcctgggtgacagagcaagactccatctcaaaaataaaaataaggactattttatggcacataaaggtgatatgaaattcaaattttagtgtccacagattaagtcttagtggagcacaattacactcattcatttacatattatctaagactgcttagactttacaaaggcagagatgaaagtaattgtcacaaagaccatgtggtgcacaaagcttgaaatatttactgtcttaccttttaaggaaaagtttgccaacctgtggtgcagatcatgaaagttcaacctattggcatcatcttggcaagttcaaggatntgcaatggcagaaaaatcctggcttcttgggaaaggaagagatagagaaatacacagacctccaggagtatcgcacaaggggtcacacccttagaggcagtcaggagcacacagatatctaggcataaacccacagagaaaagcaaacatcaagaggacatgcagagacacacagatatggataaatatcctagtgtacacactcaaaagcttggagccacccaggtgtagtagacacacaagcatctaagtaaacacacacacacatacataggggaaacacacacatacatagaggaaacccttcatgcacatagacacaaactccca

SEQ ID NO: 4490 - DNA, 661 bp, Homo sapiens
  misc_feature [331]..[331]: Chromosome 12, SNP identification no. = rs2173452
  misc_feature [331]..[331]: allele = g, in linkage disequilibrium with rs10850526, respectively
  misc_feature [331]..[331]: n is a, t, c or g
gggcaaggggaattctcatttaatgagtatagagttttagtttctgcaagacgaagagtgctagagatggatggtggtgatggttgcacaacaatgcaagaggtcatgaggaacaaggaggccttggaaggaaggaacaggttttgggtcattgcaggaggtggctcttctgcacaactctagaagagaactttatgtcaatggaacaggcattgtttttaatcatttagaaatgtttttatgagaaggggtctataggtgtcaccaggcccccaaaggagtccctggtccttctctttctctttctctctctccttacctccctcctttnctctcattcctcttctctcctccttccctttcatctctctcttgctctctctgaattattgtgttattcttgtgcagctgacattgctttctttacctgtgagagcatacctggacagttgtgggttccctctgtgtgtgtatatgtgcttggatggctctgtatatatctccatgcatatgtagtatcacatatatttgtaaacctggtagctggcatgttctttttggggccctgggagtttgtgtctatgtgcatgaagggtttcctctatgtatgtgtgtgtttcccctatgtatgtgtgtgtgtgtttacttagatgcttgtgtg

SEQ ID NO: 4491 - DNA, 661 bp, Homo sapiens
  misc_feature [331]..[331]: Chromosome 12, SNP identification no. = rs7971598
  misc_feature [331]..[331]: allele = g, in linkage disequilibrium with rs10850526, respectively
  misc_feature [331]..[331]: n is a, t, c or g
tcagaatgtgactttatttggaaatcggatcattgagatttaattagttaaaacgaggtcctgttggagtaaaatgggcccctaattcaatattaacaggggaaatttggacataggcctgcaaattggaagaacaccatgtgaagactgaagttacgctgacacaagtcaaaggactaccagaagctagaagagaggcctggagcaaattattcctgctgtgttcagagggagcatggccttgccaacatcttgaacttggacttcaagcctccaaaagtatgagacaatacacttctgttgcttaagccaactagtttctagcattctnttatagcatccctgggtaaataatacacatctcttacaaaataagtagtctagaacagtcctcagtatgtagtgaatgatatttaagtatttgctgttactggctttgtggtctctggaggagtcttctacctctctgagcgctttatcttcctctcatctgaaggaagaccagtagctctaactttcaaggacctatatatggcaaagacagtggaagaaacaaacatctcttttctttccttaatttttttaaattttaagttctgggatacatgtactgaacgtgcaggtttgttacataggtatacaggtgtcacggtggtttcct

SEQ ID NO: 4492 - DNA, 661 bp, Homo sapiens
  misc_feature [331]..[331]: Chromosome 12, SNP identification no. = rs7958261
  misc_feature [331]..[331]: allele = t, in linkage disequilibrium with rs10850526, respectively
  misc_feature [331]..[331]: n is a, t, c or g
atagtatgtcacctctgaggttaggtcataaaagagagtatggcttcttccttctctcttgaatcacttgctctggaggaagccagctgccatattgtgaggatgtcaggcagctctgaggagaacctcacatggcaacaaactgaggcctcttaccaaacagccaaggcagatccttcaccctagtccagacttcagatgtgggccaaccatttaccaacactttaaagttctggtaatttgtcaatgctttaaggaattaatttatgtaaagtgtctggtatttagaaaaaactgcttatacatttgctattatttacaaaattatttnatttaaacaccacaatcccctaagagaaagactattattcccatcttacaaatgatcatactgaagcttagagaggtcaagcaaattacataaggtcatatagttagctatggtcgtgtaacaagttagtccaaaagttagctgcttaaaaaagaaaaaaaatcttatcatttctgtgaatcaagaattctggagtggcttaactgggtggctctggctgagggtttctcagaaggttccagtcaagatattggattttattttgagatgggattttgctctgttgcccaggccacagtgagctatgtttgtgccattgccctccagcct

SEQ ID NO: 4493 - DNA, 661 bp, Homo sapiens
  misc_feature [331]..[331]: Chromosome 12, SNP identification no. = rs10850527
  misc_feature [331]..[331]: allele = c, in linkage disequilibrium with rs10850526, respectively
  misc_feature [331]..[331]: n is a, t, c or g
ctgaggcctcttaccaaacagccaaggcagatccttcaccctagtccagacttcagatgtgggccaaccatttaccaacactttaaagttctggtaatttgtcaatgctttaaggaattaatttatgtaaagtgtctggtatttagaaaaaactgcttatacatttgctattatttacaaaattattttatttaaacaccacaatcccctaagagaaagactattattcccatcttacaaatgatcatactgaagcttagagaggtcaagcaaattacataaggtcatatagttagctatggtcgtgtaacaagttagtccaaaagttagntgcttaaaaaagaaaaaaaatcttatcatttctgtgaatcaagaattctggagtggcttaactgggtggctctggctgagggtttctcagaaggttccagtcaagatattggattttattttgagatgggattttgctctgttgcccaggccacagtgagctatgtttgtgccattgccctccagcctgggtagcggagtgagatctcatctcaaaatataaaataaataaaataaacggaggctcagagaggtaaagtaacttacctaagaccatacagctgctaagtggcagagctgggattgtgaaccgagtaatctgagagcccca

SEQ ID NO: 4494 - DNA, 661 bp, Homo sapiens
  misc_feature [331]..[331]: Chromosome 12, SNP identification no. = rs1391710
  misc_feature [331]..[331]: allele = t, in linkage disequilibrium with rs10850526, respectively
  misc_feature [331]..[331]: n is a, t, c or g
gctgccccattgcctcagtttccccatctgtaaaatgaagatcatgatattaccagaggctggtggtggattaactgaggtagcattagtaaagtgtgtagcggagtgcctgaagcatgcgtaggtaacgtgtgagctctgggtttcctggctggtggagctcaaacttagaacaaatcaaggaaggtctcagagataaaaagaattctatggtaaagcattaattgatcaacggaatgaacttactagttacttgagaattaataccagcaagagttattaagaaatagcaaaaatcattttgtgatactagctaatgttgactgagtgntttctacatgtctggaaccagctaagtccttgatacatgagacagcgcagagcatagtgacgagtggggctctcagattactcggttcacaatcccagctctgccacttagcagctgtatggtcttaggtaagttactttacctctctgagcctccgtttattttatttattttatattttgagatgagatctcactccgctacccaggctggagggcaatggcacaaacatagctcactgtggcctgggcaacagagcaaaatcccatctcaaaataaaatccaatatcttgactggaaccttctgagaaaccctcagccagagccacc

SEQ ID NO: 4495 - DNA, 661 bp, Homo sapiens
  misc_feature [331]..[331]: Chromosome 12, SNP identification no. = rs11067630
  misc_feature [331]..[331]: allele = c, in linkage disequilibrium with rs10850526, respectively
  misc_feature [331]..[331]: n is a, t, c or g
gactttgcacttagttgatttgtctgacagcccttcttgaatgtaagcatcttgaaatatcatagccagcatttactgaggactgacaaggggccaggcactgggtaagagcatcacatgttttaactcattcgatcctctcccaatccctgtgaagtgtaggtagtactgttgttgcagatgaagaaactgaggcacaagaataaatgaatttcctggggtcataaaactgggcagcagaagagcagggcctggattcaggctctctggctccagcatctgccacctctgtggggatgccgttttgcctcttgtgaaaagatgacaccantgtataccaacaaggatttccagggcttcgccctgtgtctggcactgagtacacactttgcaaaatagagctgccagaggcgtttaaacaacagcaactccatcttcaataggggctgggtaaaataaggctaagaccttactatgctgcattcccagaaggttagacattctaagtcacagaatgagatgagaggtcagcacaagatacaggtcataaagaccttgctgataaaacaggttgcattaaaggagctggccaaaacccatcaaaaccaagatggtgacgagagtgacctctggtcgtccccaccgctacactcccatcagc

SEQ ID NO: 4496 - DNA, 661 bp, Homo sapiens
  misc_feature [331]..[331]: Chromosome 12, SNP identification no. = rs11615738
  misc_feature [331]..[331]: allele = t, in linkage disequilibrium with rs10850526, respectively
  misc_feature [331]..[331]: n is a, t, c or g
atgaataatccactccttgtttagcatatcatcaagaaataaccataaaaatggatagccagcagcccttggggctgctctgtctatggagtagccattcttttattcctttactttctcaatacacttgctttcactttctttactctatggacttgcctcaaattctttgttgcacgagatccaagaaccctctcttggggtctggatcaggacccctttccagtcacagaactcatttattgtgtgcctcttgcagaccagatgctttccataaaaaagccctattccctttgcacaaggacccctagaagatgggcctgcagttagnctccatttgccagctccccctattctctacccttctctgtcccgtgcccctgaagctgacccctgtggatgacacctcctagcacctctgtgatctgcttctagctggggtcatctaataggaagcactggcaggagatcaaagggaagaaggagaaaagccaggtgtttcttccttgtttcctccctaattcagaaccacatttctggaggggtgtgtccgtccctgacctgtgccaggtgactcatccaccatgaccccggccctgcctgggctcctgaaacccttcttcttttcttcctacttcagcttatggatgtgaacagctct

SEQ ID NO: 4497 - DNA, 661 bp, Homo sapiens
  misc_feature [331]..[331]: Chromosome 12, SNP identification no. = rs11067631
  misc_feature [331]..[331]: allele = t, in linkage disequilibrium with rs10850526, respectively
  misc_feature [331]..[331]: n is a, t, c or g
gctgacccctgtggatgacacctcctagcacctctgtgatctgcttctagctggggtcatctaataggaagcactggcaggagatcaaagggaagaaggagaaaagccaggtgtttcttccttgtttcctccctaattcagaaccacatttctggaggggtgtgtccgtccctgacctgtgccaggtgactcatccaccatgaccccggccctgcctgggctcctgaaacccttcttcttttcttcctacttcagcttatggatgtgaacagctctccactgttgctagactcctgatgcctcagcacctcatgttcatgtgattaacccngtccaccccgctgtaagtagtcccttaattaaactctcatagtttgaaccatctagggcagattctatctcctgcaggcagatggatgagattgcaagcattaagatgacctatcctattttacagatgaggacaaagaggcttagcgattacaggcaccagcccaaggtcacatgactcaacttactgggagcactctagtgtgcctgcccccagttcacctcctctgtccatttctcatgctgctcattgttacaaagagccatctgaacccagtggttaagaggactggcttttgaagccatacagacctgggttcaaggcccagtt

SEQ ID NO: 4498 - DNA, 661 bp, Homo sapiens
  misc_feature [331]..[331]: Chromosome 12, SNP identification no. = rs7958945
  misc_feature [331]..[331]: allele = a, in linkage disequilibrium with rs10850526, respectively
  misc_feature [331]..[331]: n is a, t, c or g
tatcctgagggaaaatcagggtgcaattaccaagagaggtgaatatactgactacttccctataatctagtttttaccattataactttaaatatacagaatcatagagctgtactcctctgtgtctgcgtttttttctccatactgtgtctgtgggatttatccatgtgtttgcatgtagcagcatttcatatttcaccaccagacagtattctactgtgaaaatacatagtaattcatgtatccattatgctgtgtgggtatttaaactgtttcaagttgtttgctgctgagaacattctgagtacaactcttagtgcacataaggacntgtttctgtttgatggggttatggtgctggttcaaggctcctagttcctttttaaaattccaaattcctttctaccaaattcttctacaagcttaacttctactcgagtttctaaccttccagcctgccctccagattatggacttgccagcccccatgattatgtgagccagttccttgttaaaatcttaagataaatgtacacacacacacacacacacacacacactattggttttgtttctttggagaaaaggctccaacccacctcaaactttactctgttaacaggaatatacctaggcatcattgataacttgcttgagaatg

SEQ ID NO: 4499 - DNA, 661 bp, Homo sapiens
  misc_feature [331]..[331]: Chromosome 12, SNP identification no. = rs10850528
  misc_feature [331]..[331]: allele = g, in linkage disequilibrium with rs10850526, respectively
  misc_feature [331]..[331]: n is a, t, c or g
acacacacacacacacacacacacacactattggttttgtttctttggagaaaaggctccaacccacctcaaactttactctgttaacaggaatatacctaggcatcattgataacttgcttgagaatgaggcttgataagaaaaaaagtggaggtgacataagaaaacactgtagtaaaaacaaattcaaagaaaggccaaaatgacatcttgatttttaagcctgcaaatacctaaaaatgtcaggagacactgaatgagcacttactgcacaccacatttgtgcttattttacggatgaagaaaactgaggctcagaaagaggatacnggtcctgtaatttgcacaactactaaaagataaaggttggatctatttaacatcaaatggatgctcctaaccaataagctctgcttccatctccttttgaaggggcagtttgggaaacccctgaaggctagctttcacctttgagatcagtgtcttcttggcgtacctctagggagaaatatgtagcctcacacccacatgtgcacccaaagccatatcgcgcattggagacattgagtaatggatctaattcttaaccccaatctaatcctaaccctctagtcaaccacccagcaatggctttaaccacctgactcatggttgcatatt

SEQ ID NO: 4500 - DNA, 661 bp, Homo sapiens
  misc_feature [331]..[331]: Chromosome 12, SNP identification no. = rs9971932
  misc_feature [331]..[331]: allele = c, in linkage disequilibrium with rs10850526, respectively
  misc_feature [331]..[331]: n is a, t, c or g
tagctttcacctttgagatcagtgtcttcttggcgtacctctagggagaaatatgtagcctcacacccacatgtgcacccaaagccatatcgcgcattggagacattgagtaatggatctaattcttaaccccaatctaatcctaaccctctagtcaaccacccagcaatggctttaaccacctgactcatggttgcatattttaatgtgcaatggtaataattgaaacacaattatcccaagtctctgccaccagccagtagcaaggcaagaagtcaacagtttacagaaagggctgagaccctcgctccacatttctgactgcagaacnaaggttgtcctgaagccaaggttgacctcacatgccatctggtttgcggtttccagactcacctctgtagtctcacctttccaggttgtcatctactcagtggccagagggcttttgacaaaacacaaacctgatcacgtcactttcctgctcacagtctttctatggctccctattacctttagaataaacttcacagtttggtctaaaaggccctccatgatctgactcctgtttattgttcagggctcctgtcttattgtttcttgaactttctgctccaataatcctgtattatttgtagttgccacaaactcggtttactctttg

SEQ ID NO: 4501 - DNA, 661 bp, Homo sapiens
  misc_feature [331]..[331]: Chromosome 12, SNP identification no. = rs7965876
  misc_feature [331]..[331]: allele = t, in linkage disequilibrium with rs10850526, respectively
  misc_feature [331]..[331]: n is a, t, c or g
acctttgagatcagtgtcttcttggcgtacctctagggagaaatatgtagcctcacacccacatgtgcacccaaagccatatcgcgcattggagacattgagtaatggatctaattcttaaccccaatctaatcctaaccctctagtcaaccacccagcaatggctttaaccacctgactcatggttgcatattttaatgtgcaatggtaataattgaaacacaattatcccaagtctctgccaccagccagtagcaaggcaagaagtcaacagtttacagaaagggctgagaccctcgctccacatttctgactgcagaaccaaggttgncctgaagccaaggttgacctcacatgccatctggtttgcggtttccagactcacctctgtagtctcacctttccaggttgtcatctactcagtggccagagggcttttgacaaaacacaaacctgatcacgtcactttcctgctcacagtctttctatggctccctattacctttagaataaacttcacagtttggtctaaaaggccctccatgatctgactcctgtttattgttcagggctcctgtcttattgtttcttgaactttctgctccaataatcctgtattatttgtagttgccacaaactcggtttactctttgaagcctcc

SEQ ID NO: 4502 - DNA, 661 bp, Homo sapiens
  misc_feature [331]..[331]: Chromosome 12, SNP identification no. = rs7980016
  misc_feature [331]..[331]: allele = c, in linkage disequilibrium with rs10850526, respectively
  misc_feature [331]..[331]: n is a, t, c or g
agagggcttttgacaaaacacaaacctgatcacgtcactttcctgctcacagtctttctatggctccctattacctttagaataaacttcacagtttggtctaaaaggccctccatgatctgactcctgtttattgttcagggctcctgtcttattgtttcttgaactttctgctccaataatcctgtattatttgtagttgccacaaactcggtttactctttgaagcctccatgcctttgctttgctgttccctgtgtgtggaaagtccttcccctatcctgtcttcctgagagctcctcttcatccttcaaaacccagcttaagcaangtcatttcctctgcctctgaagcctggcctcccttatggaattaatcccaacttctcctgcctactttattattgcccaattccccactctcatgcttccaatgtgagcacccagggttctctgtacttcatagcccttaacacacactttctcatgtggcttgtttactgctttgtcttcccagctagaccttggcctccttgaagacagaaccatatctactgtgtccattatcatatccccattgccagcacagtgcctagcacacagtagtgctcaataaatatggttgggaaaaaaaaggaagaaagaagagagagaggaaggga

SEQ ID NO: 4503 - DNA, 661 bp, Homo sapiens
  misc_feature [331]..[331]: Chromosome 12, SNP identification no. = rs10850529
  misc_feature [331]..[331]: allele = g, in linkage disequilibrium with rs10850526, respectively
  misc_feature [331]..[331]: n is a, t, c or g
tatctactgtgtccattatcatatccccattgccagcacagtgcctagcacacagtagtgctcaataaatatggttgggaaaaaaaaggaagaaagaagagagagaggaagggagaaaagaatcaagtgttctaactattctattagactgtggatttgcatattgatctctatcttaacagacccaggtacaagtcaagacacacagtaggtctttcataaacatttgctaaatttaaaaagtagcactgcagatgcccctacaaaatccagcatggccccaccactttaagctagcagccctcatgccttcattcccattagctacagnttaagaacaccctccaagctttcctcttcccccccctgcagtcagagtgcctttgtcttccaacacaagaccccttcagtgattttgtttttcatggaaaagccaggcaagttcattacattgtgttcctgccttggagatcattgtcattcatccaacatcaaagtcagagccatgatcagctcatttaagacttgttccacccatattttcttacaaccaggaaatggggaatttccttcattttttaaaccatcccagtgagtctctgccacatggcttcctttacaaacttttcttgaaacacaaggatggaatcatacctccctc

SEQ ID NO: 4504 - DNA, 661 bp, Homo sapiens
  misc_feature [331]..[331]: Chromosome 13, SNP identification no. = rs1555981
  misc_feature [331]..[331]: allele = c, in linkage disequilibrium with rs1751852, respectively
  misc_feature [331]..[331]: n is a, t, c or g
taatttttaaaattaattcactattgtgggacacagattgtctccactttttcactagtagaaacaagcctgaactgtacatctttatagaaaacctctccacattctgttttataacgggtgcaaagttagttgtgggggggtctttgaatttctgaatcatatgttggaagaattatgatttgcatgtgggagctttgctgcctgcagcagtcagggctgggatcttggagccagtagagtggcatggagacttcacaaattaaccaaaattttatttggatttaataaaacaatgtccagaagagaaagtgtcaggccccgactgganaactgtgcaaaggtctgatgataagtgtaacaggggaattggcaaatgggagtttgtcgagagaaggacacagggtggtggagggttcttcaagggagccctcaaagcagtttcaagtttgtaggcagaggggtgcccttttggccacaaaatgtgtggatttgagttttttcagtcataatggaccacagcgttgaagacggaatgccagcaactgattcagttgaagccctgcagctttctgtaaaagaaatctagagggcaagtgtgatgaccccatgttcatcacaggccaaggctttgtcttgtccatcatccttagtgcctggc

SEQ ID NO: 4505 - DNA, 661 bp, Homo sapiens
  misc_feature [331]..[331]: Chromosome 13, SNP identification no. = rs2802510
  misc_feature [331]..[331]: allele = g, in linkage disequilibrium with rs1751852, respectively
  misc_feature [331]..[331]: n is a, t, c or g
agcaatacagctagttggtaagcacatgactcctcattgagtcaaagcagctttgccacttactttctgtgtgacacgggacaagtcagtctctccaattctcagatttggcattcatctaatgggattaataactatgactatctcatgatttttgtgtgtcttaaggaaataatccagatatactcttaacactttgcctggtacaaaattcttacaaaggttagtcattgttactgttagagatttgaaaatatgccatatgagaggcaagtgaaataccctctctaaaccacttcactcccaactctgcataactcgcagctacacngtgctcaccagttacagcgcttaattcgagttttaaaatttctgttcccatttcttatgcaccattaaatctgagagagtgggaattcctctgggtacctggccaggcccctgcctgcatctggacccacctggatattgcatggatataaagagcacagcctggagttttcatctacaaagaaacagtctcactccggccagcactgcctacacgaaaagctggccagtctctaagagaaatactttgtctcagagagcaagcataaggattttccacaggctccctatccaagaggaacttcctggtaatgaaccatgcagtgtgctc

SEQ ID NO: 4506 - DNA, 661 bp, Homo sapiens
  misc_feature [331]..[331]: Chromosome 13, SNP identification no. = rs1751857
  misc_feature [331]..[331]: allele = t, in linkage disequilibrium with rs1751852, respectively
  misc_feature [331]..[331]: n is a, t, c or g
gccactgtgctaggttatctaattttctggcataaattattcatgatattcaaagaacatagtgtgtatgactttaggaaatttattgaggttcctttgtgagattgtacatggcagattttggtgaatatttcatgattgttttaaaagaatgttttctttctttcatgcagaactgtatatacctaacacttgagcttaacaactatttatatttctctacttttatttgtctctttgctccatcagttcctgaaaggggcttattaaaatctaaccacagttgttttattgcattttcttcagacttggtttatgttttgagaccacnttgttaagtacatatacattcattttatcttcatattcttcttgagtgttttaccaatttttaatattcctctggttattattatgtttttttacaaaactttgtgtgacaattaattatgttggcttatttttggttcagatttttctgattaactttattacatttttaatgattattaaaagggtgccctgcaaatgcataatgctatataaataaaaaaaatctaaaaaaaatctaatctgattggtgagttcaactcatttacatttgtacaattcctgttatattctttattttttatagagatggagtctccctatgttgccc

SEQ ID NO: 4507 - DNA, 661 bp, Homo sapiens
  misc_feature [331]..[331]: Chromosome 13, SNP identification no. = rs1782808
  misc_feature [331]..[331]: allele = t, in linkage disequilibrium with rs1751852, respectively
  misc_feature [331]..[331]: n is a, t, c or g
ccttcacctaagtttttggcagctgagtctccataagaggggacaactgcatttactatcggagaactgcagtttctctctctggctgagtagagttggtctctgtctatggggcatcctgtggtcatctctctctgcaatgcaggaagctctgtctgcctgccccctttcctacctaactgaaattgaggggtaattgcctcctgcacccatattttcgaaatctcaactcacatacacaccatcttttgctcttgacttcataacagcaatagtagaatgtcattatctttgtcagcaatggcaaaatcagcaaaatgagcacttactntgtataagcctggtcaaagataacagacgcagagagagagagagagagagagagagagagattccttcaagggtcttacaaggtatttgaggatgagaccattattctttccccagcacgacactaaaactcttctcaacaaagttgtaagtgacctgctaattgccaatcccagcaaacacttcccaataccttcctgaaatggttgacgtgacctcattatttgaacacccttccctgaatggccaagacagcaccctgccttggctctcctgctaccttctcacaccacaccctgaggtcaattcttcctccatctgtcccataaat

SEQ ID NO: 4508 - DNA, 661 bp, Homo sapiens
  misc_feature [331]..[331]: Chromosome 13, SNP identification no. = rs1751853
  misc_feature [331]..[331]: allele = t, in linkage disequilibrium with rs1751852, respectively
  misc_feature [331]..[331]: n is a, t, c or g
ttttttttggcgtatgtgtgtttcgcaaaacttggcacgagcatgagaggctgacctttaacttgaggaggaggaggaagtgcagtgaggggcagctgcggagggcgtggaggaggcaggatgactcagtgtctctgtaacgccctcctctcccctctcggccctgggccaagtgtgtccaaccagtgctgcatcagagaaagaaatcctgcagaagtgaccgctgtggtaatgacagcataaatagttcctcttttgaagttttaatgctcctgaagctgtgggagaaacagtcagctttcagattcctccctcgactactggcaaaccntgaagaactgtgttttctctccaagacacaccagagtggttataagggcaaagaatgattggactttagaagccgaaaaaggactagaggcagacaaatggacagcatttcagggtggccctgggttcacagtgaccttgaaccttcacctaagtttttggcagctgagtctccataagaggggacaactgcatttactatcggagaactgcagtttctctctctggctgagtagagttggtctctgtctatggggcatcctgtggtcatctctctctgcaatgcaggaagctctgtctgcctgccccctttcctacctaactgaaattg

SEQ ID NO: 4509 - DNA, 661 bp, Homo sapiens
  misc_feature [331]..[331]: Chromosome 13, SNP identification no. = rs1751852
  misc_feature [331]..[331]: allele = g, c
  misc_feature [331]..[331]: n is a, t, c or g
aagtgcagaaagcctcagctgggaacatgcttggcgtgtctgtgggtcagccaggttttcctggactgcagtggagtgggagagggtgacccagtaggaaatggagtttgagagggagacagaagccagatcatgtagcatcctattggctatagtgaggactttatatttcaaatcaattgggaagtcattggagggttttgacttgagaagtgtcacggtctttgctacatttttaaaggagtcactctggctcctaggtgaaaaatagactgcaagggccaagagtggaaacaacatggccagtaaggaggcggatgcagcaagaaangaagtcaggatgggagacaaaactgacttgggccagggtgatattggtggaggtaggggagtggtgattctgcttgttacttgaaggtagtgcccaaatgtgattgtagttaataccgtgactttcttgtaacatggtggtggccatgtgttttctctcacagcctccccctgtggcctcttcactcccatccaggtcgatgccaacccagctgcctctcatcacttccacttgtattcacagaggcatggggaacttctgggccctgacctgcagtccaccagccatggagacccaggccatgtcctccaatgatccatctcgtcgcat

SEQ ID NO: 4510 - DNA, 661 bp, Homo sapiens
  misc_feature [331]..[331]: Chromosome 13, SNP identification no. = rs1782792
  misc_feature [331]..[331]: allele = g, in linkage disequilibrium with rs1751852, respectively
  misc_feature [331]..[331]: n is a, t, c or g
ctacctccaccaatatcaccctggcccaagtcagttttgtctcccatcctgacttcgtttcttgctgcatccgcctccttactggccatgttgtttccactcttggcccttgcagtctatttttcacctaggagccagagtgactcctttaaaaatgtagcaaagaccgtgacacttctcaagtcaaaaccctccaatgacttcccaattgatttgaaatataaagtcctcactatagccaataggatgctacatgatctggcttctgtctccctctcaaactccatttcctactgggtcaccctctcccactccactgcagtccaggaanacctggctgacccacagacacgccaagcatgttcccagctgaggctttctgcacttgcctgtccatctgcctggaatgttcttctctcaagatcctcttggcttgcaccttcatttcactcaggtctcttctgtcacctcctaggccaggctgtgcttaaaccactcttcccaaagtagcaccctgcctgggttactccctaccctatttctttatactgcttcattcttcctaatgcctaccaccaatgacatttatattgatttgctccctctctgtctctccaaactagaaaggaggctttgtggggaaaaagactgttgttcaccg

SEQ ID NO: 4511 - DNA, 661 bp, Homo sapiens
  misc_feature [331]..[331]: Chromosome 13, SNP identification no. = rs1624886
  misc_feature [331]..[331]: allele = c, in linkage disequilibrium with rs1751852, respectively
  misc_feature [331]..[331]: n is a, t, c or g
cttttctatgccactccccggtatgggacatgttgatcaatccaaagagcagctgtaagcaatggacacacacacaggtgtgcttggcagtcctcaataaatctctgttcaagagaaggcacatccaggatgaaagcctcagttattcagcttctagggatggggaatatatgaattatagaaaggtcagtcagctaataaagtgcaaaactattaaacgtctaattcactatcatgatacctgttctacactccttacaccactaaatgccatttgaaattaccacgtgtattcgttgtttatttgtttatcatctgtttcctttattancatgtaagctttatgagaggacacagtttgccttcaatgtggaatgatcggaacaataaatatattaatgaattcatgcaactgatttgtttagttctgtttccacaactcccaaacaacttccaaattataattttacttcacagaaagatgatgtccagatcaaactaatgcaaatataatactcactgagtaattaatatagtggtgttttcatctatacatcagtttcttaaagcttgattagtgtgaatctgtctttgaaaatcaaccttagtctcaacatgcaaaaaaaataaaaatcagaagaccagtctctgaaatagaatg

SEQ ID NO: 4512 - DNA, 661 bp, Homo sapiens
  misc_feature [331]..[331]: Chromosome 13, SNP identification no. = rs1782793
  misc_feature [331]..[331]: allele = a, in linkage disequilibrium with rs1751852, respectively
  misc_feature [331]..[331]: n is a, t, c or g
caaaataaacttctctttaagaggcttcaggactgttgcaataaattagaagaaaggtagaatgaaatcctttgattaatatcagtcacttttctcatgattctaatttattccaaccaatagggcaaaggaagatttcacacagagggaggtgatctttgcgattttgtagatcttaaaatccagtattgagaagtttaggagaaaaaagtgccatgattgattggtgatgtctgccatggcacaggaagaaggagggtggcatttacaccacaaatctgacatccctcacctagacagtctttagtcttcccattcccttcaaaagttnagacatcttttcagagtccctgattacagagcaccacaaaaatctaatcaagggagtcatccatctgggattctctacttccctttccttgttgtttcctggattattcatgtaggaaaattacttttcatccttcaattcctaccaagtttgtttccttgttcacagggagccagctagactctctcagaccctccagtagaaaacgataatctatggacagttatttgtttgcaaaatcctgtgcactttggttccacagcccagcattcaagttgagaacaagaacattccatctcaactttttattggtattactcatgtatgctt

SEQ ID NO: 4513 - DNA, 661 bp, Homo sapiens
  misc_feature [331]..[331]: Chromosome 13, SNP identification no. = rs2802515
  misc_feature [331]..[331]: allele = g, in linkage disequilibrium with rs1751852, respectively
  misc_feature [331]..[331]: n is a, t, c or g
ttttaggattcttgtgataacagatgttgtggggagggagaatttggcatagttccaagatagttgcatctgtatctgaacctagaggcaatcaagtgtggggcaacctagcatctcctctccagctggccactctcaagtctaagtcccttcctgactgctgatacctggtaatatggggaccactggcaagaaagggtatgtgaattgaaagaacaggacacggagatcacagggaagatgtgagtggcattggtgattgtgtgtggggaaagaaatgtgaatttcagcaagcctctcatttgtgaaggcctgaaaaaatttaaacagnaagcaaaattatttcaggtatattaagcagaaagatatttaatacagggaattgggtgcttacaaagtctttggaagggctgaaagacaagttgtggatgacccttacagcaatgactcccagaacaacacagattgtctcaatgggttagctgttactctgaggcttctactgaagctatggattcaagaccctctcccatagctgtgatccagagatcaagaggccacaatcaggaagccaccacagctgcttctctctctgcaactgtgtctcaatgcccaggaagctgaagaaggcatactgcaatgctgctgcaggacaatctca

SEQ ID NO: 4514 - DNA, 661 bp, Homo sapiens
  misc_feature [331]..[331]: Chromosome 13, SNP identification no. = rs2802517
  misc_feature [331]..[331]: allele = a, in linkage disequilibrium with rs1751852, respectively
  misc_feature [331]..[331]: n is a, t, c or g
ggctatttctgggggatggaagtaggaaggtttctactttctattttttatatttctactcttttagaaacatatatatatatatatatatatatatatatatatatattgtttttacaattaaaaaagtaacaaagatttttgttctgtttttagtttggaacttggtgtttgggatatgagaacctaactcagtatgttcaaatctgaaactagaaagataaaaagagaactgaaaatctccaagtggtgattctcatatgaaccatacttgagaaataactatatatgagtatggatttgttggtagccttcaaacgcacagctgccnatatacctattgttggtgattcaaaattttcttgagatttttgtggaaaacagcagagttatactacgtttgcatgactctcctccctaaaattcacttacatgaacaaaactggagtctgtttttttggttggatctgtaagtttttccattaaacagtcaaatttattttcaaggagaaaattccatgagagtgtgtttgggggcctccagccttaatgtaaaggttcatgagatcatatctacaaagctgaacgttttccaaccaattctgtccctggacacgtctaaagtttgcatatgctgtacaatgcacaaccccatggagca

SEQ ID NO: 4515 - DNA, 661 bp, Homo sapiens
  misc_feature [331]..[331]: Chromosome 13, SNP identification no. = rs9596268
  misc_feature [331]..[331]: allele = g, in linkage disequilibrium with rs12874278, respectively
  misc_feature [331]..[331]: n is a, t, c or g
tatcttatatccttaattgcctgttcatatgctaaaatgggacatagaaagcctattgaaaaccttgtgtgtgtatatgtgatacacttgagggtggtttggctagaatattcttttggataaatttctgatgctcataactttagtttctttttctcttgggctggttggattcctagagaagactcttccaacctactgccagagggtagaagcctgtcagtgttatgggagctgagtgagaaaataagcctgggggtctcaatatcttgcattttacttcatccacctgttttcaatatgatacatccacactcattagtgtttattntcttgcaatccagagaccttctttttaccctctctagagaataaacctttgtcatctagtagggagagtaggaatttgaagacttttaagcaaaccaattttagcctaatattattctctctttcctgagatacctgaggttctgaggtaggaattgggttgcttctgggccttccctgatgtagataaggatttagctttctttgtactgtgatgtcagttaccactttttcatcagctaacttccaaaaattattttttttgctattgtagcgtctcccatcttcacatttgtccttatgggcttatgcctttaagcaaatctctgta

SEQ ID NO: 4516 - DNA, 661 bp, Homo sapiens
  misc_feature [331]..[331]: Chromosome 13, SNP identification no. = rs9596270
  misc_feature [331]..[331]: allele = t, in linkage disequilibrium with rs12874278, respectively
  misc_feature [331]..[331]: n is a, t, c or g
ggctggaacaggattgaagggagcacaggagtggctagggctacagtctgtgcttctacagagaagcatgtggaacagaaggttgaggtgagaggccgagtggcacagatgaaagagcatgttattttggagttggacagaccttaactggaatgctaacttggccactggtcagctatgtggtcttgggcaaattacctggcacttccaaacttcagtgacctttgccttatctgtaaactggacttgcaagattgttatggtaatcaagtggaataataggtagtaagtacttattgtcccatataaggcatttcataaatattatttnctctttcttttcattacgagggaatgagaaaaaaagccaaagacatgaaaatccccatgttctattaataacagcttccatttttctttctcatatttttataatgctttaaactatgtgggtaattgtttcagcatttaatctttccactgaattacttaattacatttatgacaaccacattttaattttgagtacatcgatggaactattaatttattctaatgaatttacaacatggctggaatttttttcaccattaattttgtggtgatagaaaactatgctgcctgccatagatttatcttgctttaatcatattttaatcaa

SEQ ID NO: 4517 - DNA, 661 bp, Homo sapiens
  misc_feature [331]..[331]: Chromosome 13, SNP identification no. = rs706603
  misc_feature [331]..[331]: allele = t, in linkage disequilibrium with rs12874278, respectively
  misc_feature [331]..[331]: n is a, t, c or g
ccacctcacattgttccttttttgtcttgtggtgagagcaattgaaatctactatattagctaattcccagtacgcaatacaatattgtcaccattctgtacatgacatgtctagacttactcatcctacacaactgtaactttgtattctttcaccaatagtgacatttgtttcttgagtcatcaatttctttcctttttttcttaacttttatttaggttcgagggtacatgtgaacgtttgttacataggtaaactcatgtcacgggggttggttgtacagatcatttcatcactcaggtattatgctcagtacctaacagtgatctnttttgcccctcttactcctcccaccctccacccttaacagaccccactgtccattgtttccttctttgtgttgattgatcaatttaaaacactttttattgactccctgccatgagtagaagcttaagctacttacacaacacccgtctgtcccctctcttccaaattttggtaatcattattttaatttttcagtgtttctttaaaaaatatacctgtaaacctcaaattttgtgcaatcaactttagagatggtctcttgactcctcaccatgttagatgagaccatccatattcttatccttccttctaactcttccatattatccc

SEQ ID NO: 4518 - DNA, 661 bp, Homo sapiens
  misc_feature [331]..[331]: Chromosome 13, SNP identification no. = rs12874827
  misc_feature [331]..[331]: allele = t, in linkage disequilibrium with rs12874278, respectively
  misc_feature [331]..[331]: n is a, t, c or g
agaaataatagagatttatgaaatatctactatgggctaggcattgtagcaggtgctgtgaatataatggtgattgaaatcaatatagcccctgctctcaaggaggttatatctaacagggatggcagagagaaaaaaagcaattataaccaagtgaagtaagtgctatgatgtgggtggcaaggagctgcgggctatgtaggagaagacctaatgtagtgcagggacaggttgggggtggaccacgggtagcttcctacaggaagagactgttaggctaggacctaaaagatgagttggagttcagcaggtgaagagaagagaagactgnttcaggcagaggaaacagcactgttggttgttccaagggagctagctcagcactgtagggagaggagcgggagtgtagagtgagtattcacgtcagggctcatctttagcttaaaaagaaccagggaactctggagagtctagttcagagtataatgctttctccatccctttcttgccccgtcctgcctggtttcttctttcggctttggtactcattgggattagttcctcactgccaagcttgaagccaataatttgatctgaagcagacgactttcagcaaaccaccggaagcctccctgctccccatctccatgcgacaacctca

SEQ ID NO: 4519 - DNA, 661 bp, Homo sapiens
  misc_feature [331]..[331]: Chromosome 13, SNP identification no. = rs12853498
  misc_feature [331]..[331]: allele = t, in linkage disequilibrium with rs12874278, respectively
  misc_feature [331]..[331]: n is a, t, c or g
tagacatttgaatagttctgcttttaccatggcttctccttttgttcacagattatgtgcttttgtattttattagcaacatgaagaatgtgttacaattgttttcttctttgtgcttgcaatgtgtgtgctttagaaggcaatgagtccctcagagtcctctggcctttcttctcatctctgtgcttgggaatgtttccacatgcccaggtttattctcctttacttatccatgtgaagagaggtctgtgaagtcccaatttttaagaacagataagacacaggaattgctcagtggggcacagtctgactttggtaaggtacaaagggngctgtctggggctcaaaaaaggactgaaaaggacgcatggagggtgctgagttggcaacctggaagagggggtggtgctggaagaagtggctgcagctgtgggacctcatttcatggaagctgctcttgagcccctgcggcccagatacctgggagaaacagggtcctgggagaaaaggcttactcttatgccttcgatcaacaaacaacagtttcctggaccacgagcaaactggaccagctgggagcaggtagagacagatgtatgggtagagggaagtcaatatacctgtagtttcctgcagaaacagaacagtcttagggcagtgc

SEQ ID NO: 4520 - DNA, 661 bp, Homo sapiens
  misc_feature [331]..[331]: Chromosome 13, SNP identification no. = rs17074143
  misc_feature [331]..[331]: allele = a, in linkage disequilibrium with rs12874278, respectively
  misc_feature [331]..[331]: n is a, t, c or g
ataactgttagaataattgggagggatggggtgaactagagcagacccctcttttgagaccaaagatatcagtggggaggggtgtggggaggggtgtagcaagggcatgtagccacttagctacagagttgggatttgaatcaatgtctgccagatttcaaaagtcatatgatttccacctcttcttagaaaaatacatatagcctcagtaaaagatgtgcacacatgcataatcacttagtgctacacacagacagatacgtgctgctggtgaaattgcggaagtgatcagaacaattggagccaggtgtagttcatctggggcgcttancaggaaagatgaactttgaacagaattctcagggaatagaagaacgtggtgagacaagagttagattaaattttttgtaaaaaaattaagtcattctccaaatcattcttcctttcagaaacttgctttgaggatataaaaaatttgcttcttgttcttattggtgtgtagattctcaatagatgaaatcacagtagagtatattatcccatgtagtgggttgctagtccctacctcttccatatccatttttttccttttctttcatagcagcagaatttttaagtgatatcatggcccctcaactacctattacattacccacccttc

SEQ ID NO: 4521 - DNA, 661 bp, Homo sapiens
  misc_feature [331]..[331]: Chromosome 13, SNP identification no. = rs11842790
  misc_feature [331]..[331]: allele = c, in linkage disequilibrium with rs12874278, respectively
  misc_feature [331]..[331]: n is a, t, c or g
taatttttacaaagtgaacataccaatgtaactggcacccaggagacacactagaacatttccagcacttcagaatccttattcccttgaaatacctcttatataccccaaagaatggcatagattaattttgcctgattttgaactttatggagtcatatagcagatactcttttgtgtctgacttcttttgtttaacataatgttcgtgagaatcacccatattatttcatagaattgtagaacatttattctcactgctatattctaatgtataaatataaattttaaaaaatccattccggtattgttgggcattcaggtagcttgngggttttagtaattataaattatgctacaatgactattctagtacacatcttttggtgaacatatgttcacatttctgtggatatatacctatatgaagaatccctggattgtagattgtgtttatatttagctatgctcctgcaaaacaatttctcagagtattttttatcaatttatcattccactagtagtgtacaaaatttcagttgttccatatccttggcaacacttggtattatccatcccttcaattttggccattccaatgagtatgtgatagtatcatataatgtttttaatttttatttccctaataactaatgaatca

SEQ ID NO: 4522 - DNA, 661 bp, Homo sapiens
  misc_feature [331]..[331]: Chromosome 13, SNP identification no. = rs17074145
  misc_feature [331]..[331]: allele = g, in linkage disequilibrium with rs12874278, respectively
  misc_feature [331]..[331]: n is a, t, c or g
ctaaagctgcttcttccctggactccacatctattctggctcacctgtgattatcccccatgcctaccctgacaacccactctcgactatgcttaggatcagcacctagactctcctggccctgtgcctactgtggtggacacatacctgtgtctcatgagggtgggatgggaaagaagacagaccttgcatatactggctgaagtgttcacatgcatgtaatcagtgttcctcgacctcggtaagaaaccacagggctgcccagtcctggtccctgcgtgtgttcttgcctgcatcttacaaatattaggaacaggcccacactagcatnctatctcttttggtgtgttactttcaaaaaaggaaacaacatgaattttcattaaaaatacaggtaaatttctcactcattctaaatcctgaaggcaggtgcacagaaaattagtctcaatggaaacagaaagtgaaattgaccacttttatttctcccttttaagtaaattacctccctcagcagagaatgtatttattccagaattaatctgagcatttgaaagttattgacgttttagaaaagtatatccaaaggattgatagtggcaagctgaacagtattttaaaaacccacaaaatgtgccaaggtctgaaggccattcaagtt

SEQ ID NO: 4523 - DNA, 661 bp, Homo sapiens
  misc_feature [331]..[331]: Chromosome 13, SNP identification no. = rs12871645
  misc_feature [331]..[331]: allele = g, in linkage disequilibrium with rs12874278, respectively
  misc_feature [331]..[331]: n is a, t, c or g
tggcatctgtagtagccaagggttgacattagagaggatgaaataagcaagtggtaatggctctcaggaattatggtaacaaggagaagaggatggttcttcactgctaagcagcttgactaggtgagagacagccagcatcttactgcttcctggcacatggagtgttccactgagaatcacaggcagactcaggcaaccagccacttttcaaatgggctgtcttctgtagtgctgttccaccaccattctgtgggcccaactgttgccattctgggggatctgccattgctagcttaattccattcacttcaattcaattgctgttatnaaaggcctactagtgctattcccctgagaatctatagagacagggtagaactcttggatgaaaaggtgagggcttaggacatctggttagtggaacttacttatttttgggcctctttcatcaagtaacaccagctgatgcctaggagtgtgggagtcatatcggctttgttgtcgtctgttagaaactcttcgtgttcacaaaaaaaaaaaaaaagcagccttggagaaatcttcaacccagaaggagttaagctgtgtgtctgcacagcgcagctttgttctggcaaggtcccatcagtttaggtcatttctgatgacttcactctcc

SEQ ID NO: 4524 - DNA, 661 bp, Homo sapiens
  misc_feature [331]..[331]: Chromosome 13, SNP identification no. = rs17363566
  misc_feature [331]..[331]: allele = g, in linkage disequilibrium with rs12874278, respectively
  misc_feature [331]..[331]: n is a, t, c or g
taggagcctactccacacaaggtgtttctcgtttgtcctgagactctagctctgaagggaaagagttcctgttggggccatcgacccccatagccactgggataaacactgatgtagttgttgctcaactaatgagtgaaggaaccaatacggccaaaaaattttttgaaacgtgtgccctccctagaaggtcagctggggcccctgttttgcatgcacaggcctgccctgccctgccaccctaccaagtttctttgagtttgtaatttggtctgagactagagatgtcatctgatatgatattcccacccagggaaagtcaccttgggangaactcttgttatccctggtgctcagcaaaagcctgctggctccttgagtgctgggacactcatgtctcaacaaggcaccgtcactcttgtgtccccgtgcctagagcagggcctggcaggcaggcactcaggaacaacttgatgaattgagttgttgaagtcagctaaatctttctgtacaggtgcaaaacttgctgttcaaaataaatcctaaacatgaaaacagaaagctatagacaaaatcctaagttccagtgatctcagggaggcaaaacctgtcattctttgaaagaacctatttggatatgtatatgttaatatatgtgtat

SEQ ID NO: 4525 - DNA, 661 bp, Homo sapiens
  misc_feature [331]..[331]: Chromosome 13, SNP identification no. = rs12874278
  misc_feature [331]..[331]: allele = c, t
  misc_feature [331]..[331]: n is a, t, c or g
acgattttctcttcgtcgataaggaaagcatgcttgatcctgtcatgaacacatttagcatacatggaaccaccataggccctgctgacatatttctttgttttggacaatctcataggaattttaggtcttacagcatgaacccctcaaagtctgcctgggcacataccacatgtagattttggtgctttcccaaccttcttggtataaaggtaaatgattctattaccaggggttccagacagcttagttttgttagaggttgtattgtaggaaagcctatgttggtgtgtcaaacgcaggaccattctgagtgcctgcagacaatgtncccggaagaggaagaagaaaaccttgcgaaccttgcgaggtcctccacataatttttaatattaagattgcttgcttatttgtttattctctctctctagtccccctccctggaccctcaccaccctgcccagcactaggcactaggagcactccatgagggcagtgattatgccttattccccattgaaacctcagcaccttgtccaatgcctggaacacagaaagatgcttaatgttggtgtgcttaatgaatgaattgctaggaacaaatgacttgtgaaaacacaggggtgcctctcctggcttggtttattaccctggatgctga

SEQ ID NO: 4526 - DNA, 661 bp, Homo sapiens
  misc_feature [331]..[331]: Chromosome 13, SNP identification no. = rs12864797
  misc_feature [331]..[331]: allele = g, in linkage disequilibrium with rs12874278, respectively
  misc_feature [331]..[331]: n is a, t, c or g
ttccttttctctccttttttccttaaccccccacccctactcctgtctgcctggctgtctccctcctttcccccttccttctttccttccttccttcctttcttttcttttctttctttcttttcttttctctctctctctctttttcctctcccctcccctcccctcccctccccttcccttcccttcctccatccctcttttctccctctcctacacagggctttgaccttaatatccttgcatataacaaatgatgtgagtggtcatctctcatctggtttggttactggacagactctttaagcttcatctgattgtgtatgaatancagtcctcttattaaagagataaaaaccaaaactaaaacaaaaatagtaaaacaagcagcacgcatctcacttgtcttagatttctgtgcccttttttctcagcaagacccaagtattctaaccacaatgattctgatgaccaggaattctagagctggcagcctggctgagtcagagggatttgagttggatcagcacagaatccagaccaaagtcacggtgaactggcatgaaaaacaacaacaacagcagcggcagcagcagcaacaatatagacacatgcaaaacacaaagcagccagctaccagccacctccgaattgtatccaa

SEQ ID NO: 4527 - DNA, 661 bp, Homo sapiens
  misc_feature [331]..[331]: Chromosome 13, SNP identification no. = rs200220
  misc_feature [331]..[331]: allele = c, in linkage disequilibrium with rs12874278, respectively
  misc_feature [331]..[331]: n is a, t, c or g
ctgtaacaactcagagaattttaatatgtatatacagggctgatgagtaaccacttcaaatattctgcaatggggtctcatcttccctttcaatccttttaggtggaggtgctagagctgctgtgaggggcccagaaaaatgaatgggcatgggtgcatgttcaggggttcacacaaggagtagaattagaactggaattctgaggggaagatccacaggaggaaaagaaatgtatcttttcacaataaacatatacgtatgcatgacttttataattcaaaaagtgaattttttaaaaaatctggataaaccccatatatcatcatgatnaagaaagtatccaataaaaaaggttcggaaattaatttgaatttaacaagtgagtttgcaatttaatttactaagaggtgagtatatgagtggcattacagagtctacagacaaggtttggttggcacctgtgtttatggacctcttgtaataaatcaagggaacatggggatgaggcccaggctgtactggagcagggattgcaattgccagacagtccaggtaaggacttatttattcatttgggctggcacagggctttaaagcattggaatctgaatgtctttaagtgggaatgcacccttcattgtgacagcaaccaccacacgt

SEQ ID NO: 4528 - DNA, 661 bp, Homo sapiens
  misc_feature [331]..[331]: Chromosome 13, SNP identification no. = rs1041514
  misc_feature [331]..[331]: allele = g, in linkage disequilibrium with rs9592985, respectively
  misc_feature [331]..[331]: n is a, t, c or g
gttattttcacatgttgattaggtatttaatggtaaattgatgtaagtctaattttatttcttattttcagtgacaacatctcaacaatgaatatttgatcttacaagaaaagtgttatggccaaattacaaaaaaatgcatatgttaactttttatagtagatatgactgcattttaactttagcaatgcaataatcctcagaaactacatctgcaaggagcctcaaagcaagtgttttttttaagttgacaaaaatgttctttgatctgtaagactatataaatcagtcaacaaacatttattggaccctttttatatataacatgggntactatacaaaattcagaaaagcacaagacatgatctctcctagggaatttgaattcaaaactggaaaaacaaactgcactcatgtactcaaaaaaatatatattatcaatccagtgtattaaatggacactaaactaatagtacagattgcaaagaagaagaaagcattgtacatggggtctggtcaaggaacactttctgaaggaagtaatttaagcaatattataaagaatatatttgggagacattaagcaccaaaggctaatgtttaggtatgactgaaatgtttaaaatgaaattctaattgaataagtgagtgttggatacag

SEQ ID NO: 4529 - DNA, 661 bp, Homo sapiens
  misc_feature [331]..[331]: Chromosome 13, SNP identification no. = rs4885168
  misc_feature [331]..[331]: allele = g, in linkage disequilibrium with rs9592985, respectively
  misc_feature [331]..[331]: n is a, t, c or g
tagatagatatagatatatgcccacacatacgtatatatacagtcacacatatatactcaaatatacatatgaatatatattatatatgtgtaaacttataatacatatattcatactcgtatacataagaacatatgtattataaatgtacacatatataatagatatattcatactcatatatatgaatatatattatatatgtatatttaaatatatatgtgtgggtatgtatatgggcaagttagctacactctctgtgccttagttttttcctatataaaataaagatgactacagcacctaacttttaaggttgctgtatatgcntataagtaagcatatgtaaagtgttcacacaaggtatatacatatacacatacatgtacacatatgtatacatacaacacacacgtatacatacatatacacatgtctacacatatgtatacatacatatacacacatatgcacatgtatacatatatacacatatatatatacacatggatatacacacacatatatacccagatataggtgtgtatatgaatatatacataggtgtatatatatgcatgtatatgtgtgtatatagattctattgtttctgtcctctctattattcatacacacacacatgagggagagagagagaaa

SEQ ID NO: 4530 - DNA, 661 bp, Homo sapiens
  misc_feature [331]..[331]: Chromosome 13, SNP identification no. = rs7992578
  misc_feature [331]..[331]: allele = t, in linkage disequilibrium with rs9592985, respectively
  misc_feature [331]..[331]: n is a, t, c or g
aataaattactaaaaaataaaaaagaattaggtctcaaaagtcaccaagatattgtctctcagctctgctctgcttgtgaggttaatttctttgtctctctttctctacccccaccctctctccttctttttagtgttttcccactggctgtctctacatcaggggtcaccagccctcaggccgtggactggtactagtctctggcgggttaggaattgggccgcacagcaggaggtgagcagcagtccagcaagtatcaccacctgagctccgcctcctgtcagatcagtggaggcattagattctcataggagtgcaagcagaccctantgtgaattgcacatagtctaggtttcatgctccttatgagaatctaatgccttgtgatctgaggtggaatagtttcatcctgaaaccatccccacccccacactgtctgtgggaaaatcaccttccacaaaaccggtccctggtgccaaaaaggttgtggactgctgctctacataatgggaaatattgttgctaatgactggaattttacctctttcatgatcaactaccattcttttggtcctaacttgaaaaatccccaggaagagattcatcagctccagtttggccaggtgcctgcagacaacctatggaatggtcatataatat

SEQ ID NO: 4531 - DNA, 661 bp, Homo sapiens
  misc_feature [331]..[331]: Chromosome 13, SNP identification no. = rs9543578
  misc_feature [331]..[331]: allele = c, in linkage disequilibrium with rs9592985, respectively
  misc_feature [331]..[331]: n is a, t, c or g
aaatccccaggaagagattcatcagctccagtttggccaggtgcctgcagacaacctatggaatggtcatataatattatgttgaactatatgaaattgccattacatattctattgctaaaaagtgtcaatttcttaatttaatcataatagccaaaattaataacaatagttgaatgtttactatgtgccaagcattgttttaagcgctttacatatgtttactcatatgcatttacaacaaccttaaaagttaggtgctgtagtcatcttcattttatattggcgaaaactaaggtgcagagcgtgtagctaacttgtccatcatcanatagtagtaagtgttagagccagaattctaacccaggcagtctggtttcagagtctactacattacaagatagtatctgaaggaattgtatagaattgggggagaatattcactcataggcatgacatttactttggtggggactctttgctgattttattctgtggattgttgcattgccaagggtgtataggtccttagagttggtcatggtgttaatttaatatactctaagaattatgacaagatggggctgcagagctgaagcctttctttcaataaacgtccaaggtgccatggccagaggactatggtgaaagctgatctgga

SEQ ID NO: 4532 - DNA, 661 bp, Homo sapiens
  misc_feature [331]..[331]: Chromosome 13, SNP identification no. = rs9600261
  misc_feature [331]..[331]: allele = a, in linkage disequilibrium with rs9592985, respectively
  misc_feature [331]..[331]: n is a, t, c or g
aaagctatagagtcactcatttttacaaggtgactactatgtgtaagcacttctgctgaatctatgatttacacatttctccatcacagataaatacagagcagctctcgatgtagccaagaaccatctcctaacatggctccctgccaaaacacactcagcttccatactctgtctgctgtccacattgctgcctgcccagagagaaaaggagctctttgtggtctttcggttcttctagtggaaaatttctatagactaagcagagagatagcacaaagcagaccatttgcaagtggacaccgtcccctgccaaaggccatggggactntaaaaagaaacagactcctacggtgtgaatctgccagtttcatactataaatggaaattgtttttaaaatctaaagggattgtaatgactaaacatcaatactgcttgtctttacccttgatgaaaaaaatggttaaaggacatgctttcacaccagccaaggaatgatgaaaaaaagctctaggcagtatcaaaggacacaacacaaatgaacaccacaatctaattgctgggaacggaaaatccatctaaatgtttgtaagaatgtgtgtgtgtgcgtgtgtgtgtgtgtgtgtgtgtatgtctgttttaacataattaaggaagaat

SEQ ID NO: 4533 - DNA, 661 bp, Homo sapiens
  misc_feature [331]..[331]: Chromosome 13, SNP identification no. = rs9592985
  misc_feature [331]..[331]: allele = a, g
  misc_feature [331]..[331]: n is a, t, c or g
tatataatttgagatgaatattactttttttgcctaaaactttcagttgtatggaagttacaatcaatttcgttaatgaaatacaacatacataaaacataacatagctttaggacataacatttgaatgtaattttgtagcttattacaattggtaggatgaatatagtgttaatcttattttaggtaatttactaagataactcgaatgcagattggctcctcagattttcttccatgtctacatattattaaaaacacaaataaactctatgcattcttctgtcagtcaggttggaataagttatgctgtgataacaagcaatcctgnaatcttactgactttcagccacaaagatttatttattattcatatgacttgcccatcgtgagttgaccagagaccctcattcatgtgcccttactccaggatgcaggctgatggagcagacctcatcttgaaggttcttgtttgcccacacaggtggaaagaaaccatagtgaattttgctctagttcataaagcttccacctggaggtgacatacatcactcctacaggaagttacatggggagaaagcaagctcaatcgtaccatgtattctgatggagaagcagaaacatttggtgagcatcactaattaatacccttcagtccccc

SEQ ID NO: 4534 - DNA, 661 bp, Homo sapiens
  misc_feature [331]..[331]: Chromosome 13, SNP identification no. = rs7991085
  misc_feature [331]..[331]: allele = a, in linkage disequilibrium with rs9592985, respectively
  misc_feature [331]..[331]: n is a, t, c or g
tataacctcgttcttttcatgtttcccatgtctttccattgacttctgttcatatgatgtaaaagtcacatcttatttttgaatttacttacattagaagagaaactttttcctgaagttgtgaccttgatattggttggctagggccctttgcttttgcttctgggtatgtgctatagtgaaatctaagtatgattttcttgactagagttgtgtctgtggtttccctggtgtgttagactagggttattggtggaggctgtggtatagttgtgctggggattggaatgccagatgggcctatcttcaggtttcagtggcagtggtggtngactaagctcatctatccttcttccctggggtggcatatgctgacacttggcagttccagtcaagctagttcttgggcctctgggtggccttctcgggtggcaattatagcagtggtgtacgcgggaagtgagcaggctctcaagcctatggaaagtcggtgtggtatgactgatggcagtagcagtcatggtgagattctcttctaggtcccaagcattgtgtacccttatgttggtagtggttggaatgggctgtgttggccaacctccaggccagttggtgatggttgcaggtaggagccagctgaggtggtagtggtaaggagttt

SEQ ID NO: 4535 - DNA, 661 bp, Homo sapiens
  misc_feature [331]..[331]: Chromosome 13, SNP identification no. = rs6562815
  misc_feature [331]..[331]: allele = t, in linkage disequilibrium with rs9592985, respectively
  misc_feature [331]..[331]: n is a, t, c or g
gtgttggccaacctccaggccagttggtgatggttgcaggtaggagccagctgaggtggtagtggtaaggagtttttgtccaacctcagttacctaggtggagtgctcagatgtcccaggtggtagattgggttgtggaacctccacaattctggatccaatactctgttttgaggtggatgaaactgggcagagttggactgggcaagcttgcatttaggccccccaaaagtgagtgcatgcaccagccatcataggtcaggttagggtgatcttcaggcctctctggcagaatgtttggatgagaggcagctgctgctacactgaaacnctgccatggggagggtgagtccagtcccaatagtcacaggtttggctagagggtggggaacttgcatccctttcatggggcaagtggcaagtttgggggcttgtttccctgtccatattgttgccttatttaataaactgtattaatatgcttatgtttgaacattccatcttgaaagtaatttgtattaatatgcatgattttcctacatataaggatttagcttatgtgtagtcatctattttcatatgttattgatcatttcagtctaacctttgaaattaaacttaacgctctaaacaggaatactttctgtttcctgcaggaatt

SEQ ID NO: 4536 - DNA, 661 bp, Homo sapiens
  misc_feature [331]..[331]: Chromosome 13, SNP identification no. = rs4403930
  misc_feature [331]..[331]: allele = g, in linkage disequilibrium with rs9592985, respectively
  misc_feature [331]..[331]: n is a, t, c or g
tcctgacctttcttccttcctttgctttactgaggaatttcaaagcaaatctcagatctcattccatttcactcctacgtacttcagtatgcatctatacaacatgcaaactttttcctatataatcttaatgccattatcacatataataaatgcaaacgtaatatttttgttatgatttagtaataagttcatactaaatttcccagactttctaaaaatatctttttacgtttgatatgtttgaatcagaattcaatgttcacaaatcacatttgattgttttagttctttacctaccttgatccttttctcttttttttttcatgcnatcgacttaccactgacactggattagttgttttcttgtagaatttcccacagcttggatttgtttgattgcttccttgtgtgtcatttaatttgctcttttatgtcccataatttctataaatagaagccagctctagacttttaaggagtctaggtgtatatattttttttcagctggagtacttagtagaagattctgtgggattcatattataccagataaggaggaactaggtttttgattttctgcttttaacagaacagccagaattgtttattggaatgtttcaatctacttttatatagtgattgtatccactgatgatta

SEQ ID NO: 4537 - DNA, 661 bp, Homo sapiens
  misc_feature [331]..[331]: Chromosome 13, SNP identification no. = rs1074634
  misc_feature [331]..[331]: allele = a, in linkage disequilibrium with rs9543827, respectively
  misc_feature [331]..[331]: n is a, t, c or g
tcttggctcactgcaccaggcttaggcgattctcttgcctcagccttccaagtagctgggattacagtcatgcaccaccatacccagctaatttttgtatttttagtagagacggggttttgccatgttggccaagctggtctcaatctcctgacctcaagtgatctgcgcaccccagactcccaaaatgctgggactacaggaatgaatcctgcacttggctagattttttaaaaaaatttttaaacgagctcgaattattaattttttatttttatctaaaatcaaacaagtgatgactgcagtttcaaaatttatacttagtctttcntaggtaaccagttctgataatttatcccataagctgatagtcaaatttgttatttaactttacaaaaggaacgaattgcctgtgttagatctttttgtgatggaaaataaaattaaaagtattttatcatattcatgagagatttggtggtacaattttgtggacattcagtatctagatcatcacctactttattgatttgttatctaattatgaaatatgctgtaataatctaaagaagctttttctttcaagcttctaactttaatttttgctcttcagtcttatctgctgctgaaaaacctgttacattccttcattgtatgcatg

SEQ ID NO: 4538 - DNA, 661 bp, Homo sapiens
  misc_feature [331]..[331]: Chromosome 13, SNP identification no. = rs10161758
  misc_feature [331]..[331]: allele = g, in linkage disequilibrium with rs9543827, respectively
  misc_feature [331]..[331]: n is a, t, c or g
tagaaataggatttattatgtcttgcactatcccatgcaatactcttaacctcccttgaatgagagttcaaaattgtagggtcatgactagaatgattataccttgcccactttccaggattgcctgatcctctggatacaattctgtctactagttatgaccctaaactagtcagagagtcaacttcttcacagtggccccttctggtacctaaaatatccccacattgttaaccctaacttctaatcataaaaaaaaatagactctgactggaagaacaaagtgcttctgtaaaaatcattatggtgctgtccatagaggccaggcatntaacagggtaaggaataaatattggagctatttttttctgtacagttcacttttactcctcagagactcttcaactgctttatcagagttgttcaactccagagaatctgcccttcccaaaacagataactggcacacctgccatgttaaatgattcctacactactacatagtctgtgccctcttaagcaccattttatttatggaacccatcctttgcttgtttctcacaaataaaccagttgcatctatcaggtaattattactggcttttctttacatcccatgggaaacaggtctccttacagcatgtgcccgggaacttacaaa

SEQ ID NO: 4539 - DNA, 661 bp, Homo sapiens
  misc_feature [331]..[331]: Chromosome 13, SNP identification no. = rs12861426
  misc_feature [331]..[331]: allele = a, in linkage disequilibrium with rs9543827, respectively
  misc_feature [331]..[331]: n is a, t, c or g
gctgtatgaatccacaacaattcatttagaatgtaattttgcatgtgattaatctatcatctggtctgattgcctctggtacatttttataattataaattgaatggagaataaagataattcaaataatcttattggctaaagcacagggcattaattcagtttataatagcaataatgacctcagcccaggacatttccaggcaattaatgactggctagagttaatggcccaagtttcagccaaggaccatcaactcctcctagctggtcatcaatcctcagaaaatgcccaatgttcagatccattcagagtttgactccatcccanctttatattttcaaataagtttgtgctttactctttttcctcaaattctatgtcacttgtaaactgggtaaaaataattgacattgtttttgaataataaattaattcatggaacataagaacaactaaatgacacatagacattatacattaaattgtattgtaatattgaaaacagtacagacccaaagcacagggcatagatttttctaactccaactttctcaaaatcagtcctgctaaggaaaacctgggttgtgagccccgattttcatgttcttagtttatttctcccagagaaaaaagtcagatttaacctgtaatgtacac

SEQ ID NO: 4540 - DNA, 661 bp, Homo sapiens
  misc_feature [331]..[331]: Chromosome 13, SNP identification no. = rs12867144
  misc_feature [331]..[331]: allele = a, in linkage disequilibrium with rs9543827, respectively
  misc_feature [331]..[331]: n is a, t, c or g
aggacatttccaggcaattaatgactggctagagttaatggcccaagtttcagccaaggaccatcaactcctcctagctggtcatcaatcctcagaaaatgcccaatgttcagatccattcagagtttgactccatcccaactttatattttcaaataagtttgtgctttactctttttcctcaaattctatgtcacttgtaaactgggtaaaaataattgacattgtttttgaataataaattaattcatggaacataagaacaactaaatgacacatagacattatacattaaattgtattgtaatattgaaaacagtacagacccaangcacagggcatagatttttctaactccaactttctcaaaatcagtcctgctaaggaaaacctgggttgtgagccccgattttcatgttcttagtttatttctcccagagaaaaaagtcagatttaacctgtaatgtacacatttctgctttctacctatcaagctatcctgtttgattttaaattcttttccagaagtgggagacatagcagagggaagcatgacttaatatgcaagcccaagtgataccacatgacaatgtcatcagtcatttcaagcttctctagagtattttacctattttttattcccctatctcacaggaggcag

SEQ ID NO: 4541 - DNA, 661 bp, Homo sapiens
  LOC122145
  misc_feature [331]..[331]: Chromosome 13, SNP identification no. = rs9600396
  misc_feature [331]..[331]: allele = g, in linkage disequilibrium with rs9543827, respectively
  misc_feature [331]..[331]: n is a, t, c or g
ggaaacttcagccctgttttgcagagctaagaaatgaattcatgtctgtcttaacacaaatcctatgtgctttctgtctcactgtggctcacatgctaaaatctcctcctatgattccatacaatatgctatttcacctagagggattttacaaaccatttaaatgcaaacagggagaattcaccattactctgctatcatggattgtgtgtttacgtaccccactgccaaattcatatgttgaaaccctaacccccaacagaatggtattaggaggtgagccctttgggaggtaactaggtcatgagggtggatggaacccctatgatgnaattagtgttctcataaaaaggcaaatagagttagctcaatcaatttctactatgtgaaactacaatgaaaaactggcagtctacatcctggaagagggccctcaccagaactcagcatgctggcaccctgatcttggacttccagccaccaggcctgtgagaaatacatttctgctgtttataagtgacccagtttatcgtactttgttacagcgtctcgaactaagacactaattatttaacttgtttaactataaaacaagacatggtacatgcccccaaaaacctctgatttgcatctaactggaggttagaatttggaaaatctt

SEQ ID NO: 4542 - DNA, 661 bp, Homo sapiens
  LOC122145
  misc_feature [331]..[331]: Chromosome 13, SNP identification no. = rs4356354
  misc_feature [331]..[331]: allele = g, in linkage disequilibrium with rs9543827, respectively
  misc_feature [331]..[331]: n is a, t, c or g
aagttaaagatgatcttaggtttcaagatcacctcagtaaactaagtccacataagattattcacatgtgggcagaaagcgaaatccacaatctctcaagaatgcagagaactagaattcctcatccaacagttatacaacttgagtgcaagaaatacattttagttatgtcttttattggccatgattatgttccagcccctaaattaaaagaagtaaagctcagtagtgaaggaatggaagaaacctactaacaaactcttcatttgatgcagcggttatgtaatgaatgtacacttttttataccaacctcagcaagtataacatacnttggcatgctgcaaaggtctggttgtttgacatcagtcagtcagaagaaccaacgtgtcttaatggactggaatcattgttccatgactataaaatgtctcacactttttccagaaaggagtagtaaggaaagccattaatgaatgagacctcttcaatgctgttttaaacatctcagcagataatgaaggggatttttttagctaagacagaagctttggagaaaatgaatgaagatcacattcagaagaatggaaagaaagctgcttcatgcccaccagtattgtatggtgaatatcaccaatgcccaccgctttcaatgtaaacaca

SEQ ID NO: 4543 - DNA, 661 bp, Homo sapiens
  misc_feature [331]..[331]: Chromosome 13, SNP identification no. = rs4242957
  misc_feature [331]..[331]: allele = t, in linkage disequilibrium with rs9543827, respectively
  misc_feature [331]..[331]: n is a, t, c or g
acattagttctgaaaaataattcaagtcattctagaaaatgattcagtcattgaatcaagtcaattattcaagtccatagtttctcctatttgagaaaaggccagacattttcttccttaaataagaggcacataatctaacgctgcatcttaagaagcatgggtgatgttcagctacaaaacttactttagaacacagtttagactgataaaataggaaaggctacaaaaaatgacatataagggtgccctctccagaaggccaaagagccaacaactcaactggagtgagaatgaactggataacttcatgttcatgctatgtctttgnagctcctaaaagtaagacgatggtaaggataatttgatactgtgctttagattaagaatatttctccttaccacatttccaccaaaaatgtcttgtaacctcagtagggcatttaggtcaaagacgtaagttctaatattacaggtctttaccccacagttccctttgttcccatcccagccacttactataatatctgaaatttcctcaaggtacatgagtcttgatggaaagtccgagaacacttggacacaaggcattaggaacactaaatgctacttgatcagggaaacttatgttgggctaagagtagatatcctgggcaaatgg

SEQ ID NO: 4544 - DNA, 661 bp, Homo sapiens
  misc_feature [331]..[331]: Chromosome 13, SNP identification no. = rs4595676
  misc_feature [331]..[331]: allele = g, in linkage disequilibrium with rs9543827, respectively
  misc_feature [331]..[331]: n is a, t, c or g
ggaagagtagccaaaaaaataaaataaagtaaccatctttaacccaaaataatgtgcctacatacaaagtttggcagtcactacaaaccagatagaaagttattcccaagggggactgagaacaatctgaagataattgttgccattgttgttttcagttttgcagatttccagccaacttcattcattaccatgtgcctctgggcctacacttggccattcataaccttctaagcacccattttcagagcaacaaagtgtagaatagcagtgacaaactgcagcctacaatggttgtttttgtaaataaagttttattggaacatatctntaccctgtcatttgcatactgtttatggccgcttttgtgctgtaacagcaaagttgagtaattgtgacaaagaccttatggtccacaaagtcaaagatgtttactttatggccttatttgtttgctaggtctactgcaacaaagcaccacagactgggcggctaaaacaacagaaatttattgtctcacagttctggagcctagaagtctgagatcaaggtgttgccagggttgattcctaccgagggctggaagagaaggatgtgttccaggcctctctccttggcttgcagatggccaccttctccctgtgtcttcacattgtcttgc

SEQ ID NO: 4545 - DNA, 661 bp, Homo sapiens
  misc_feature [331]..[331]: Chromosome 13, SNP identification no. = rs12428193
  misc_feature [331]..[331]: allele = g, in linkage disequilibrium with rs9543827, respectively
  misc_feature [331]..[331]: n is a, t, c or g
tactctgattctctttctatatcagtaaattgggttcaattggactgcacatgatgcagtgagtgtaagatcaagttgcgatgctgtgcaagagagtagcatgaagaataaaaggtattgcctatgagttatatttatattatatattcttggaataatttactgccattcaaccctggggctttgtatatttgaacttgagcttggctcactaatatatttagtgggaaatatattagcagcttcctcctggttgaagaaggaagtggctgctgtggtccaacttgttaaatgtttctgaatcactctgctcagtatataatgacctatngttttctcaatatctgaaggcttccttcaggagcttctgacacaatttcttctcgtgtgtcccacctgcctacctggtgtactcattggcttgcatcactctttggtaactgtagtttgggagcctgagacttctggtctggctgaagtccaggatcttattttagtttcctccgttctgccactggatagcacagttagtctcagatgcccatctctacctaaaagtttttagaaccaaactctttccaatgcctgacccatcctggacctttacctccatccttgtgttctacctcccacacctcaaataagaagctaggaaactcat

SEQ ID NO: 4546 - DNA, 661 bp, Homo sapiens
  misc_feature [331]..[331]: Chromosome 13, SNP identification no. = rs2225002
  misc_feature [331]..[331]: allele = g, in linkage disequilibrium with rs9543827, respectively
  misc_feature [331]..[331]: n is a, t, c or g
tattttcattcctgtccatgggatcttatcgaatgattacacaaagagccagtggccaaatggaattcatttattcttttattgataactgctgacaggccctgaccatccatgaccaggtaggtagaggacattgataagagctgcttaataaagtcctctgacaaatcagtaagtccttttggagaaaaggctgtagagaagagactggtaatatgtctaacacaggaacctttactcatggagaaaatgtgattcagagaatattctggacctctgcccatcaagatgagcaattgtccctctttagaatatcagtagctagaaaagnggtgattagaaataggcctagcttgcctctggtatttcaaatcctaaaaccctacataaaaagttgatgacaacatcaaaaataacaataacaacaaacagagtttgaagttagatcttctgccaaaatctccatcagactaatgcaggtgctccatgcatgtcaccagctttgttcttctctcctcccagagcactaacccaatatgcttgtggtttcaccctttaaaagaaactgacaaacaaaaatacccatgtaacttcataataactttaccacctgcaatagtgatctggcagctatgatagtagtatcgccctcttccataat

SEQ ID NO: 4547 - DNA, 661 bp, Homo sapiens
  misc_feature [331]..[331]: Chromosome 13, SNP identification no. = rs9543787
  misc_feature [331]..[331]: allele = a, in linkage disequilibrium with rs9543827, respectively
  misc_feature [331]..[331]: n is a, t, c or g
tcacacaaatgaaattccatttaatcctgggcagctcttttgaggcttggggagcccacttgccctgactcataggtttctactgtccctttctgcctatctctaagtaattaaccagcttcatgtaatttgttgtgtgggccagtgttctgtctcactcgtttcaggtaagtagtagaaactgcagtccaagatgcagcgggctgaagtagtaatcagtgcatggtaaacttgctttacacccttccccaaacaactatcaaaactaccaatagaattaaatgacatagcaattgaagcatctagtatgtgccttgaatagaagtgctcngtagagttatctataataaccttttaacaacctgaaagaacaacttgccaacatatcaaggattgaagtaacagtgataatgaaagcacaaggaaacaccaaggaaatggaaaaactgacacttcttttattacaaatacttgttctttatcagtcacattatgaagaaataaacaatagtgataatcacaacatatccaataaaccactctcccataaaacttaatattctgtcattaagaacaatgatttgtacataacaaataagatataattaaccaatgactgaatgcatctttttttgtaatatcttagtttatgttctctaat

SEQ ID NO: 4548 - DNA, 661 bp, Homo sapiens
  misc_feature [331]..[331]: Chromosome 13, SNP identification no. = rs2209532
  misc_feature [331]..[331]: allele = a, in linkage disequilibrium with rs9543827, respectively
  misc_feature [331]..[331]: n is a, t, c or g
gttccaacagcctgggaggccactggtgggagtcctggaatacaatggccagagaacctggagctttgacatctaagggaaagagaagaagggtatcctgcctcaagaaaagagaaccccaattcacgctcactctccttgtttgttccttctgggcccccagttgaccggatggtgctcattcacattgagggagaatcttccccactcagtctgccaactcaaatgccagttttttcataaataccctcacagacacaccgagtgcagctcaatttttctaaccaaatgccaaaccaactgggtttctttcttaccagaagaggaatcnactccatgtctaagaaaacattgacaatcagttatctgggtatcacttaatccagtcaagttgacatccaaaatcaactgtcacagggaccatcttagaattctactactataaggagaaagacagcaagatgagcaaattataatactaaggggtttccgttgcataaaaaagaaacatgacttctccactacacaatttagtaaattaaatatgtccaccattgaaccacgtatagagccaaaaggaaaaaaatgaaagaaatatctaaaaatgtaaaatgatggactcatcttagaaaattaaaaagacctgaaggataagtccaag

SEQ ID NO: 4549 - DNA, 661 bp, Homo sapiens
  misc_feature [331]..[331]: Chromosome 13, SNP identification no. = rs2876700
  misc_feature [331]..[331]: allele = t, in linkage disequilibrium with rs9543827, respectively
  misc_feature [331]..[331]: n is a, t, c or g
tatttcattcagtaccatccacattccctactgtttacttttcacagttttattcttcacaaatattgtaatcaccaaccagaagaactgaaattgtcactggtacctcctttctccccatacccagacaatcctagaatttttctttcagaatattcaatgtctagagttctatcagagattttatctcaatgtaagaggcattcccagttgtttcagcagaaatgagtagtactcagaaatgtaagagatttaccaaaatttcattcacattaaaaaaatacaagttgaggaatgcagtcactgaagtattgctatgcatagctgtcangttatatctttgcaacctcttggtgtgaagtcatcaccaacctctatgccttctagtgttgacaggacccctcccacctgtagttccaggccttcttgcctgaaacctcctatggttaggtagcaatgaatctttttcaagatgctgtaagttactattaatggaaaaaaatctcctatctatttcagaggtccaaggatagagtttcctatcctctcttccctgaatattccattcctctcttgcaacagatttactatcacactcagaattctattttgtaagattccttctatctaatcattccttaataagatgattgttacttaa

SEQ ID NO: 4550 - DNA, 661 bp, Homo sapiens
  misc_feature [331]..[331]: Chromosome 13, SNP identification no. = rs12430473
  misc_feature [331]..[331]: allele = t, in linkage disequilibrium with rs9543827, respectively
  misc_feature [331]..[331]: n is a, t, c or g
tgattttgctattaaactatgcattatttacaccaaaatgattttttatgcctttctgaaaattctgataccttggagaatcatttacttcatgaaaagtttttatcttaagttacattaggatatgaacattacattgctattgcataaaaaattaaaaaaattttctctgattatgaatataattcttattttaatgcttttttaaaggtttgacttatgtgtctattcatgcaggggtaacccaggatttttctttaattctcaagcttttgttgtaagaccgaagagactgcactaaaatgcttcgcaaattttacaaagatgtacnataatggtcacctatgaatgtggccttcagggaatgcaaatttcaccaccaatggtggtataaaaagcttccatgaattatgtttcaaagctcaaaatatggttcacttttctctaggtcagttagcacattgctcacaatagtttccccatctctcccaggagaatgtcctggcttgtgttgatttattgcatttttaactatattagaagtaatgctttcttatggatgacaagcaacaaatctcttcaattttttttattaatgtcattctttccttgtgtagctgtcattaccaatcctctcaccaatgttccctattataattcc

SEQ ID NO: 4551 - DNA, 661 bp, Homo sapiens
  misc_feature [331]..[331]: Chromosome 13, SNP identification no. = rs12430706
  misc_feature [331]..[331]: allele = t, in linkage disequilibrium with rs9543827, respectively
  misc_feature [331]..[331]: n is a, t, c or g
ggagaatgtcctggcttgtgttgatttattgcatttttaactatattagaagtaatgctttcttatggatgacaagcaacaaatctcttcaattttttttattaatgtcattctttccttgtgtagctgtcattaccaatcctctcaccaatgttccctattataattccaagagttagtcttctgtcatctgatgaaatatatgttagtttcaatacactgagttctttttttcaactatgaaatagtcgatgttaatttttttgaagttgcttgtatggtatttttaaaatatgttcatgtttccagtcttgagtggcccctcactagnaagaatgtatatggcattaacatggtacctctgtgcatacatgtaattaataatgtttttgaagctctttccccttcaaatagcactcagagtgatcaatctgacatgtagaaaatactcaggcaagtattaatagcaaaaatgaaagaaattagaaaaaatatttggtatctatgcatctccacattcattatcttgcctaatcttcatataaccatacaaaatatacaaagtaagtattatctgctattataaataaggaaaaaggatgcttagtaaattttcataagtcttatcttcacttcgaaaactatactcttctcactctag

SEQ ID NO: 4552 - DNA, 661 bp, Homo sapiens
  misc_feature [331]..[331]: Chromosome 13, SNP identification no. = rs189602
  misc_feature [331]..[331]: allele = a, in linkage disequilibrium with rs9543827, respectively
  misc_feature [331]..[331]: n is a, t, c or g
gattttcacacaaaattgattctcaactgtattctctttctaagtgaatggcataaaaattttctcattcatggaagccagaaacataggagtcatccttgactactacttcttaatctctgtattcacactttctctaggttctgctaatacatattcttttacctttgtcacatgcatttctgctgatactagtcaattacagtattgttaaataataatggttgaaggcatcattcttagttttcagaagcattagcagataaataggtcctcataaaagccaagattccaaaaaataaagcaaaaccatgatgctggatgccttaantatatagttttttttttgtcttagtccatttgggccaccataacaaaataccataaactaggtcacttataaacaacaaaaatttatttctcacagctctggaggctgggctgtgcaaaatcaaggtgcctatagatatggtgcttgatgacggctcattttctcatccaaagatagtaccttctcactgtgttctcacatggtagaaaggatgaagggtctcttggacctcttttataaagacactaatcccattcatgagggttctgcacccaggacttaagcacctcccaaaggcccacctcctaataccatcaccttgaggactag

SEQ ID NO: 4553 - DNA, 661 bp, Homo sapiens
  misc_feature [331]..[331]: Chromosome 13, SNP identification no. = rs970988
  misc_feature [331]..[331]: allele = a, in linkage disequilibrium with rs9543827, respectively
  misc_feature [331]..[331]: n is a, t, c or g
ttgaagccaatgcttattgatcattctgaaaatccttgggaccttaagaattatgctaaatctattctgcctgtgctctataaataaaaaaaaacctggatgacagcacatttgtttgcagcatggtttactgaatattttaagcccacagttgagacctactgcttgaggggaaaaaaaagattcttagttactcaagatctctgatggagatctacaaggagattaatgttattttcatgcctggtaacacaacatccagtctgcagcccatggatcaaggagtcatttcaactttcaagtcttattatttaagaagtacattttatanggcaatagctggttttgatagtgatttctctgatggatttagtaaaagtaaattgaaagctttctggaaaggattcaccattctagctgtcattaagaatgttcataaatcatgggagaatgttgacataatattaacaagagtttggaagtagttgattccaactggcatgagtgattgagggttttaagacttcagtggaggaagtaactgcagatgttgtagaaatagcaagaaaactagaatcagaagtagagtctgaaagacgtgactgaattgctgaaatctaatgataaaacttaaagggataaggcttcttatggatgagga

SEQ ID NO: 4554 - DNA, 661 bp, Homo sapiens
  misc_feature [331]..[331]: Chromosome 13, SNP identification no. = rs12875786
  misc_feature [331]..[331]: allele = t, in linkage disequilibrium with rs9543827, respectively
  misc_feature [331]..[331]: n is a, t, c or g
cagaaaaacaacataaattctccactattatttccatcttccttgttgacttacatacctctcctgcaataaataatttactgtaataaaaaatttactacactaaaactatcattaaggtcactgaaagaataaatcatcatgttttacagagtatgcctagctaaccaactttactgcttggatttttatttgctgggtgatgggatgtgcaaggcagttagaggaagtggggattactgaataaaaattaaaacattcctacagcaagccatcaggattgaacttgacctttgggaaacaaatcaaagagtctcataaaagttgtgcntcaagccacatcagagttatttttatgggcaaaatctgcagtcagatctctgataatgtgtgtactcacaactctcaaagggaagaccaggacataataccagcttgttggcatccttcaaaaacaagatggacagtctcagtcattttgcattctcaaatatgcagaaacactacgataactcactttagccctgtgccttttagatatatatcatattacatatatgatgtatcatgttattgaaataactttggagaatactagatttcagctaacaatgtaaataccattaccttaatcaattatttgttaaaatagaattttaga

SEQ ID NO: 4555 - DNA, 661 bp, Homo sapiens
  misc_feature [331]..[331]: Chromosome 13, SNP identification no. = rs356801
  misc_feature [331]..[331]: allele = t, in linkage disequilibrium with rs9543827, respectively
  misc_feature [331]..[331]: n is a, t, c or g
ttgagggatgaggtacaaggtattgctggatcattaagcgatactgtatagttttaaaatacattaaataatattaatgcaaacagatataccctgcaattagatgcaaaattataattcttaaactttattaatgctattcatatttagaatacatcaaaagggagcatagtatttgaacttgaatgataatttgagaaaatgttttcctgatcataactttccattattattcccaggacactacctcacttcagcttcattcatcattcttgattttatagctacactttccaaaaatttattgattcattttatcagcaaacatttnttgtgctcctaatatgtatttaaagcaccatgctagtcatgattggaagtatatgatgactacagcatctttcattcctgcttcaaggatcaagatgataatagtacctgtacatgggactctaaagctaagtagaaagtaaatatcactgaagttgatgttataaactaaggaagccagagtattggcagagacaccaatgattatactgaagtcactgggaatgttgctagaaattagatgaaaagaatatagagtcgatgctaaaatcttagaaaagagcagaaattgacaatggcctcacgttcacttgatctcaccatttcccct

SEQ ID NO: 4556 - DNA, 661 bp, Homo sapiens
  misc_feature [331]..[331]: Chromosome 13, SNP identification no. = rs4885242
  misc_feature [331]..[331]: allele = c, in linkage disequilibrium with rs9543827, respectively
  misc_feature [331]..[331]: n is a, t, c or g
agtgggaaaaatgggccagaccttattcaaatgcccactagggctaacctcattggagaaaacaacttagaccatatgacatgatgctgaaacatagcagaagagtcaggcacagggctctagaaaggtaatgagcaaagttactcttctgggcatcaaagagcagtgagaaagcattctagactgaggactagtagacaggcattattcatcccaaacatccaagcctcagatggcaatgaccaggagaacaactccctggacaagaagactggcaaaaataagagaggagagacacatcctgagtcattgaaaggaagcagggaaatgntgtgctggcttaagggctgggttggaacttaggatcaaggaccaaagcagaatcccacaacccaaaattaagccaatacagggataaatgaaaaggctgccaggtgtgcaaaagaaattttggaaagaggataggcagggtagaaccaggtgttgtgggatcaatggttcatataagtttgaggccctatttaagcaaaagaatataagagttattaatacaaaggtaatccgcctctcagaaccttagaagggttcatgtaagtggtgttctgtagctcacactcttttagctatacagcaaattcaccttggaaggtgagtgagggaa

SEQ ID NO: 4557 - DNA, 661 bp, Homo sapiens
  misc_feature [331]..[331]: Chromosome 13, SNP identification no. = rs1562380
  misc_feature [331]..[331]: allele = c, in linkage disequilibrium with rs9543827, respectively
  misc_feature [331]..[331]: n is a, t, c or g
atgcccagaacatgggtgttaatagcccctctctaccctgggctgggcagaccacgtgtagatcattgtgttccctctcagaaacacattttataagggtcattgacaaatagtattacatttgtttgaaggacgattatcaagatggtgaatgccaaatgagggacattaaagaaattgagggtgtttaaccttgagaagaaaagccctagaatgaaatggggagacaataggtcctatcaattatctgaagttttgttgcgtggaagaggtgtcaagtttgttccctgtggctcaactattaggtggaagttactgggaatcaagttgnggctcagtctcagcaaactttctaacaaggaaggctgcctgaaatttttataagctctctgttccccctgcctgagagtgttcaaacagagactggagcaccacctggcagatgtgcttaattggaaggtaagaggaactagctggaggaacaaacttagatgtcttcaacggcctaggcaggcaggtgaggtgaagccgatgagaaatgtactaataagaagataaggtatgaggcacactggagagagatgcttccccaaactccacccagctgatggcattcaggatgcatgcaccctccccccacccaccacccacacacacaata

SEQ ID NO: 4558 - DNA, 661 bp, Homo sapiens
  misc_feature [331]..[331]: Chromosome 13, SNP identification no. = rs356802
  misc_feature [331]..[331]: allele = t, in linkage disequilibrium with rs9543827, respectively
  misc_feature [331]..[331]: n is a, t, c or g
ctggcagatgtgcttaattggaaggtaagaggaactagctggaggaacaaacttagatgtcttcaacggcctaggcaggcaggtgaggtgaagccgatgagaaatgtactaataagaagataaggtatgaggcacactggagagagatgcttccccaaactccacccagctgatggcattcaggatgcatgcaccctccccccacccaccacccacacacacaatattaacaagccatgtttggcctatatggcaccagttcatgactattaagctatatataacttcacaggtctcttccaaggttagaattcccgcattctaagattgntttctgtactgtgccctaaggactatgtaatattttatgttaatgatcatgaacaactttccatttattttaaaaaatggaatgtaggattccattgataatttacatatttaaaggaaaagatggacttttgtaaattggaatatatttccatgtttttcctcattacaaccccaaaacccaagatgaatcaagaatagaggtagtcttcattaagggcaccatctatcattataaatgcacataaacagaaaccttaaaaactgaaggttttaatcagattttcccactgatccatatatttgcattctttttccccagtattttaca

SEQ ID NO: 4559 - DNA, 661 bp, Homo sapiens
  misc_feature [331]..[331]: Chromosome 13, SNP identification no. = rs17195525
  misc_feature [331]..[331]: allele = t, in linkage disequilibrium with rs9543827, respectively
  misc_feature [331]..[331]: n is a, t, c or g
ttacaaccccaaaacccaagatgaatcaagaatagaggtagtcttcattaagggcaccatctatcattataaatgcacataaacagaaaccttaaaaactgaaggttttaatcagattttcccactgatccatatatttgcattctttttccccagtattttacaataaatgccagatctataaatatggagaaaacagatcaaaaccaatacttagtatttgaataattgcccctttttctaaataaaggaataaaatccttagttttgtttcaaataactaaatataaagtatatttgacataaattttattaaatttaaatgataggnttgatgtatgtaagtagtcaaatcattgacaataaactgtatattttagagtcacaaaatcattttcttgtggaaatataaccttaaatatacaataaattataccttgtttaaaacgccattattttgtgtctttgatacttgaggtgcccaactgatgcactttgttgtgggatttggtgaaagtggtgtttttaattgacaacttttaactgattaacaccaataattgataaagaggacagaaaatatctgggaacaggaatgaggctgatgagtttgtttttgaacctgttgagtttgatgctcctgtggggttcccgtgagtct

SEQ ID NO: 4560 - DNA, 661 bp, Homo sapiens
  misc_feature [331]..[331]: Chromosome 13, SNP identification no. = rs2328922
  misc_feature [331]..[331]: allele = a, in linkage disequilibrium with rs9543827, respectively
  misc_feature [331]..[331]: n is a, t, c or g
agactcctgagcagctgggactactggcatctgccatcagccccagctaatttttgtatttttttgtagagacaggattttgctatgttgcccagacttctttcagcagttttagataatgctttatttttttctccttctctgctcgaccaggctccccaaaatttaaattagttcatctctgcttcctcagctccttttaaactttctacctgtttctttttgtttgtttgtttctgttagaaagattggatcacttttataacctgtgtggaaggaaggagacaatagaataggataagtgatgatttccaattctctgccaataatncccattttctgaaccaactagaaaccagaggtcacaggtgagcttggctgatgccatctgggaaagtcaggctgccagaactcagagaagagtggaaaagagccctgaagagtggatcctttccataactgaattcagttattccattctctttccattagttcctatccttcctgctgcccctttaatactccagctccacaaatgctctgatatgactggatcttcagtccattcaccccactacatttactctatctcttacccttccccaaccacaactgacttttattaagaagcttagagttatggctcatacttttagttact

SEQ ID NO: 4561 - DNA, 661 bp, Homo sapiens
  misc_feature [331]..[331]: Chromosome 13, SNP identification no. = rs809257
  misc_feature [331]..[331]: allele = c, in linkage disequilibrium with rs9543827, respectively
  misc_feature [331]..[331]: n is a, t, c or g
tggagaaggtaaatgaaaagttttgattttggatgatgcctcattctgtaaaagcctcaaggtgaaaggaacagtctaagatcaaactaagatcgcagacaattttcatgcagagagcacattggaatcaatgaacagaggaacattggaaggtggaacctcaggaaggtgaagaagtgtcctgcaatttggacaatgctcagggaccctggataaatgaagtcatggatggagttagctaatctcagcactcttaaacttaacttgaaattactttgctttggtattaaaattacttgagccagtgtttaggagaattctgccttattcnatagattagaagaaaaatatctgggacaaaacctcatggtttcaaagaagcagtgactgtgcctcaaattctacccatcctttggggactgtcctatagttaatttcccccaaaagccatctcacctactttactttcccttaagattaatagctcttggctgggcatggtggctcacgcctgtaatcccagcactttgggaggccacggcaggcaaatcacctgaggtcaggagttcgagaccagcctgaccaatatgatgaaaacccgtctctactaaaaataataataataataatattaatacaaaaagtatccaggcatggtggc

SEQ ID NO: 4562 - DNA, 661 bp, Homo sapiens
  misc_feature [331]..[331]: Chromosome 13, SNP identification no. = rs2225003
  misc_feature [331]..[331]: allele = g, in linkage disequilibrium with rs9543827, respectively
  misc_feature [331]..[331]: n is a, t, c or g
aaaagaaacaagattggattaggcccccaggaagccagcttacctctcacatttaaaaggatcctagaggataatgctgggtagacaatcaaatgtcactcattgagtacaatggtacagtcagttcatggagggtacaaatgcaaccttcaaggatgctccaattaaaattactgatcagctcttcatgcgctatatctaaatcttcatagcaataatgaatttacagtttcacattaatatatatgatgatgatgaagtctgcttttatgagccatttttcttcctatggagaaatggaagagtaatttactgtgtttggccaggactncccaaacttagtaccaggcaacgcctgatagaaacttggatcacagggggcacacaaatgtcataggctctagggctgaaccaaacaaggttctttcttgttctatgattccaaaagattctctgtttgagagaaaagggcaagattaggcttcagagaaaagagcccgtggttccagagtaaggaatcaagcagtttatcagtctttcaagcaagagaaaagtatacctcacagatatagaatggtcaaccaatagaaaaactaagatggaacaaggtatagcattaaagaggaaatctctgaaggtctcaataccacttatacactac

SEQ ID NO: 4563 - DNA, 661 bp, Homo sapiens
  misc_feature [331]..[331]: Chromosome 13, SNP identification no. = rs2166586
  misc_feature [331]..[331]: allele = g, in linkage disequilibrium with rs9543827, respectively
  misc_feature [331]..[331]: n is a, t, c or g
gaaagatcatgcaagaagtatcatagaaatcagactaccaagttaggagttgggaggaaggaacttgggacacagcagtaaaaggaaacttctgatttctttttccggaacccttgcagatccttctaccttttttcagtgtctccaactgctgacatttggaaaccaaagccaaaagcaatacatcaaatcagcagctccaggcagaaggctgtttcaaaccaaaattgatgttttaatctttaatcaagtaggaacggcatgttgtgaatgtttctagggagtaaatttactagtgctgtaagattggcccaacctaggtattttgtanagatttggtttcattttagtccctggtcaaaacaaaacagcactgtatgcaatttataaaccaaaatgaagcataacgcagtgtagacattcatcataagttcttttattaaaattcctaaggtttagtccagatctgtaatcagatcctacatgtggagtatgccattacattgaggaagagaaagtaaatggttttagaaatgaaaaaccaaggaaggaaaaggggagtgctatgattttctttccatgaaaaacatgtagtactgtggaactgatttcagctgaaaactgagggaaagcgttgcttggatggttctgtttgtcttct

SEQ ID NO: 4564 - DNA, 661 bp, Homo sapiens
  misc_feature [331]..[331]: Chromosome 13, SNP identification no. = rs1156501
  misc_feature [331]..[331]: allele = a, in linkage disequilibrium with rs9543827, respectively
  misc_feature [331]..[331]: n is a, t, c or g
tctcttcttcctttaatccgtttttaaaacttgaagtaaggacggacggacattcccacttgccacgctaccaaaaattccggaccagagtgagggtccataatgaaatttaccaaactagaagggcgttcactgagagtgacatctctaatgtatttctgctgaatttctctgtataataacagtgaacttttcataacagtaaaatgtattcgatattgaattaagaagggatattcacacaaagtcactgccttttccctctctctttcctaggcttctgtcagcactgattccctatcccttatttaaatattttacataagcaatnaccttgcaagagtaagttaaaacattgcccatgttggagggtccacatgcttgaagtacagatgcggcaaagatggagaaaatttccagattttttgcattgaaagtgtgtatgtgcctggaaggggtgttttaatgagcagctcaagccaaatgggtgattaataacagacagaaactaatctgttttctaaggggtagtcactgctaatactaggtttttgtgcaagtttagggcaatggctaatggcttgtaacgatctgagaaagattgagcactgaatcaggaaagattatgcaaatatatcccttcttgatagcaaaagcaggg

SEQ ID NO: 4565 - DNA, 661 bp, Homo sapiens
  misc_feature [331]..[331]: Chromosome 13, SNP identification no. = rs804909
  misc_feature [331]..[331]: allele = a, in linkage disequilibrium with rs9543827, respectively
  misc_feature [331]..[331]: n is a, t, c or g
gagaaatagatgtataagcaaccataaaaattctaagattacaaagcctatgtctttaaattccctgaaaagaaaggccacgtttttaaaaacacactaggagagtggtactgtatcttcaggattctgaaaataatgtaaagacctggtaaatgagtggctgaaagtgaaatatgaactagagatacacagttgttaaggcaaaacaaagaaaaagtagagatttttttaaaacacagagttaacagtggtatctgcatcatatctcctctttgaataattacaagtgattgcagcttgctgggcccagttaaatcaattcataattatntcacttcattttaatgaaactaaaggaaaccgactcacacaaaataggtgtctttaaaggaactaccaatagcaactaaacctaatcactcatggtcaagtaaatattaaaatcacagagctgacatctaccactccttatctgagatctccattggactacattgccatcttagaaggaatgaccatcagataagtcgaaataatcaagaagactatttggaatatgtgtgtgtatacttacacttgataagttaatctcattcaatgtgtattcttggctttaaaatagtaatgatagtataaagccatcatattaataaaaatatta

SEQ ID NO: 4566 - DNA, 661 bp, Homo sapiens
  misc_feature [331]..[331]: Chromosome 13, SNP identification no. = rs9530388
  misc_feature [331]..[331]: allele = a, in linkage disequilibrium with rs9543827, respectively
  misc_feature [331]..[331]: n is a, t, c or g
agaaggaatgaccatcagataagtcgaaataatcaagaagactatttggaatatgtgtgtgtatacttacacttgataagttaatctcattcaatgtgtattcttggctttaaaatagtaatgatagtataaagccatcatattaataaaaatattaaaaaatgaacagccaggacataaaaacagaccatgacaattttaagggaaaaagtcatagttattgtcactgcagtattttatcaaatttctctattaaatctatggcaactgtttgaagtctcttttaaggttctttcacttcattgtgaaaaccaaattccacataccagcnaagaaagtctccttcctgcaatagatagtagagtggactgcaataatgggctaaaaataatagagagatgatctaaaaccatttctttttcaacatacactgctggaagacagaaaatattgttggaaatggaaagaaacaagccacaaatcacacattgtgggagatttggtttttttggatgaagctatggattatgctatgtttcagtctatgctatttgctatatgctgtttcaataatgaaatatacaaagaactacttttttgtgagccactgaggatggttgtttggtctgaatgtaaccattcatagaatatatatgcccat

SEQ ID NO: 4567 - DNA, 661 bp, Homo sapiens
  misc_feature [331]..[331]: Chromosome 13, SNP identification no. = rs9530389
  misc_feature [331]..[331]: allele = c, in linkage disequilibrium with rs9543827, respectively
  misc_feature [331]..[331]: n is a, t, c or g
aaataatcaagaagactatttggaatatgtgtgtgtatacttacacttgataagttaatctcattcaatgtgtattcttggctttaaaatagtaatgatagtataaagccatcatattaataaaaatattaaaaaatgaacagccaggacataaaaacagaccatgacaattttaagggaaaaagtcatagttattgtcactgcagtattttatcaaatttctctattaaatctatggcaactgtttgaagtctcttttaaggttctttcacttcattgtgaaaaccaaattccacataccagcgaagaaagtctccttcctgcaataganagtagagtggactgcaataatgggctaaaaataatagagagatgatctaaaaccatttctttttcaacatacactgctggaagacagaaaatattgttggaaatggaaagaaacaagccacaaatcacacattgtgggagatttggtttttttggatgaagctatggattatgctatgtttcagtctatgctatttgctatatgctgtttcaataatgaaatatacaaagaactacttttttgtgagccactgaggatggttgtttggtctgaatgtaaccattcatagaatatatatgcccatgactggaatggagatgggaatctgct

SEQ ID NO: 4568 - DNA, 661 bp, Homo sapiens
  misc_feature [331]..[331]: Chromosome 13, SNP identification no. = rs518507
  misc_feature [331]..[331]: allele = t, in linkage disequilibrium with rs9543827, respectively
  misc_feature [331]..[331]: n is a, t, c or g
tttctccatgattcacaataaatcccctttggtggtataaacctggggaaccccctaaagatagggtccctctcttgcccagcttgaaggttcttcatttgtattgtattacaggtgatcagagttgtgcagcaggtgatctaattggcatcttgtagcattttgggcactttgcttctggtttcaattatttgctgcagtagcatgcctcagaatgaggcagcagatgcatttcacaagctggagtatctctgagctctgaaagcagattcccatctccattccagtcatgggcatatatattctatgaatggttacattcagaccaaanaaccatcctcagtggctcacaaaaaagtagttctttgtatatttcattattgaaacagcatatagcaaatagcatagactgaaacatagcataatccatagcttcatccaaaaaaaccaaatctcccacaatgtgtgatttgtggcttgtttctttccatttccaacaatattttctgtcttccagcagtgtatgttgaaaaagaaatggttttagatcatctctctattatttttagcccattattgcagtccactctactatctattgcaggaaggagactttcttcgctggtatgtggaatttggttttcacaatgaagtgaaagaa

SEQ ID NO: 4569 - DNA, 661 bp, Homo sapiens
  misc_feature [331]..[331]: Chromosome 13, SNP identification no. = rs9543795
  misc_feature [331]..[331]: allele = c, in linkage disequilibrium with rs9543827, respectively
  misc_feature [331]..[331]: n is a, t, c or g
aatcacacattgtgggagatttggtttttttggatgaagctatggattatgctatgtttcagtctatgctatttgctatatgctgtttcaataatgaaatatacaaagaactacttttttgtgagccactgaggatggttgtttggtctgaatgtaaccattcatagaatatatatgcccatgactggaatggagatgggaatctgctttcagagctcagagatactccagcttgtgaaatgcatctgctgcctcattctgaggcatgctactgcagcaaataattgaaaccagaagcaaagtgcccaaaatgctacaagatgccaattanatcacctgctgcacaactctgatcacctgtaatacaatacaaatgaagaaccttcaagctgggcaagagagggaccctatctttagggggttccccaggtttataccaccaaaggggatttattgtgaatcatggagaaatacttaaaatatttaattgcatggggaatgaacatatacgtcttttaaagcacacagaatcactgggtatttcattgcaaaatatttaaaagaggtatcgaagaataatttgtgtatttttattttacaaaaggcaaaagtgtcagttttgccaacctttaatttgatgaaaagtagtaatcagcaatat

SEQ ID NO: 4570 - DNA, 661 bp, Homo sapiens
  misc_feature [331]..[331]: Chromosome 13, SNP identification no. = rs7317785
  misc_feature [331]..[331]: allele = a, in linkage disequilibrium with rs9543827, respectively
  misc_feature [331]..[331]: n is a, t, c or g
tttcttgagacaggatctcattgtcacccagcctggagtgcagcggtgcgatcatggctcactgcagactcaacctcctggctcaagcaatcctcctgcctcagcgtcccaagaagctgaggctacaggcacatgtcaccatatctggctatttttttaaattttttgtagagagagagtcctactatgctgcccaggttggtttggagctcctgggctcaagcaatcctcttgccttggcattccaaagtgctgagacgacaggtgtaaaccaccgcacccagcccggaaaaagtttttgggaaggaaaaaaagaagttaatctacttantctgtactttcaaggtaaaaatgatatttaaacaataagtcacaaagtccttttatttaaaggagactcatgctatatttcaaaaattgatgtttaaaaatatttccatatttataagattttgctgttgaagatgatactaaaaggtctctcagagaatcttatttaaacacttgaaaaactcagaaataggcctctctaacctgttttcacagattccaaatagaatctcaatagagaatgaatatcagtttaaattattaaaatatagcacatactgggtttaacattagaataaatggacacttgtcaccctatttttaacaaatg

SEQ ID NO: 4571 - DNA, 661 bp, Homo sapiens
  misc_feature [331]..[331]: Chromosome 13, SNP identification no. = rs1475339
  misc_feature [331]..[331]: allele = g, in linkage disequilibrium with rs9543827, respectively
  misc_feature [331]..[331]: n is a, t, c or g
actatatttttttaaaaacacatattttatcagttagatttttataacaaaccctcaagtaaatacatatatacacatatatgtacatatgcatatgtatataaatacataatttacttatatatcctatggaactaatataattcaatagcataaaatgtacctgaaatagaaattttaaaacagaaaaaagctgaaaaacattagtttttaaattttagtttttcattactacaagatgcttttgtattcgtaaaaatgtgttaaaactagagtaatatagtttgacattttttttcccaaacaaaaaaaaagctccattgaacacttnatgatatagtaacttaagatctggttctgaggctacttattttgataatagagtttaagaacaaaaagtatgttttacaaatatacatagatctaaatagttttgtctactaaataataaaacatatttttacctcttaccctcatttttgcaaagcatttgttaaaaatagggtgacaagtgtccatttattctaatgttaaacccagtatgtgctatattttaataatttaaactgatattcattctctattgagattctatttggaatctgtgaaaacaggttagagaggcctatttctgagtttttcaagtgtttaaataagattc

SEQ ID NO: 4572 - DNA, 661 bp, Homo sapiens
  misc_feature [331]..[331]: Chromosome 13, SNP identification no. = rs4885244
  misc_feature [331]..[331]: allele = a, in linkage disequilibrium with rs9543827, respectively
  misc_feature [331]..[331]: n is a, t, c or g
ctgtaaagcattgaaaacaattgaaggacagctatgtaatacatgaatattgtacagcaatgaaaacaaatgaagtacacctatatggaatgctgtacaaccatggaaataaatgaactacaactacatgctatagaaaatgttgtatagaaatggaaataaatgaaagctacatgctacatggaataccatacaacatgaaaaaataaattccagccaaatcctgtatttatatgaaatactgtatttgttcacatggctccatctttcaagcataatgttgagaaaacaacgcaagccacagaaaacaaaattctgatttatgaagttncaacaaaaagcaaggctaatatatgggtattaaagctataaagtaagggaatggttatcttaagtcaggataatggttatttgtagatagaatgaagagaaatgtaaagacacaaggatagtttttaagcttaaaatcttagctatctatagagttatatgcaaaaaaaaagtcttgagttggcagtcacagctggtacagtagctccatgatgtcatcaaggaccaggctctttgttttttctgctccatcttcctctgttcttggcttttgtcttcatagtagcaagatggctgctatttcatgcatcatgtccaccatccaggtaca

SEQ ID NO: 4573 - DNA, 661 bp, Homo sapiens
  misc_feature [331]..[331]: Chromosome 13, SNP identification no. = rs1867938
  misc_feature [331]..[331]: allele = a, in linkage disequilibrium with rs9543827, respectively
  misc_feature [331]..[331]: n is a, t, c or g
atgtgactttttcgacatggtagtaaaatggctgctgcactgccaggcatccttgaaacaaactcaactgctgtgtttttatcattttgtacctggatggtggacatgatgcatgaaatagcagccatcttgctactatgaagacaaaagccaagaacagaggaagatggagcagaaaaaacaaagagcctggtccttgatgacatcatggagctactgtaccagctgtgactgccaactcaagactttttttttgcatataactctatagatagctaagattttaagcttaaaaactatccttgtgtctttacatttctcttcattctanctacaaataaccattatcctgacttaagataaccattcccttactttatagctttaatacccatatattagccttgctttttgttgtaacttcataaatcagaattttgttttctgtggcttgcgttgttttctcaacattatgcttgaaagatggagccatgtgaacaaatacagtatttcatataaatacaggatttggctggaatttattttttcatgttgtatggtattccatgtagcatgtagctttcatttatttccatttctatacaacattttctatagcatgtagttgtagttcatttatttccatggttgtacagcattc

SEQ ID NO: 4574 - DNA, 661 bp, Homo sapiens
  misc_feature [331]..[331]: Chromosome 13, SNP identification no. = rs9318310
  misc_feature [331]..[331]: allele = c, in linkage disequilibrium with rs9543827, respectively
  misc_feature [331]..[331]: n is a, t, c or g
gtaagggaatggttatcttaagtcaggataatggttatttgtagatagaatgaagagaaatgtaaagacacaaggatagtttttaagcttaaaatcttagctatctatagagttatatgcaaaaaaaaagtcttgagttggcagtcacagctggtacagtagctccatgatgtcatcaaggaccaggctctttgttttttctgctccatcttcctctgttcttggcttttgtcttcatagtagcaagatggctgctatttcatgcatcatgtccaccatccaggtacaaaatgataaaaacacagcagttgagtttgtttcaaggatgccnggcagtgcagcagccattttactaccatgtcgaaaaagtcacatgctgaagacaatggaggaggaagaaataatgagaagagatatttgcatcatcatccttttggaggaggtgtttgaaaagtggtatgaaaggtgacctttacagggaaaaaaaaaaggcatcgtattttttatgagaatgccagaacaaaaaatatatggaaatgattatttggctttcgggaaattaggaccagtaattattttgtagatgatacaaatcgggctaagaaatctttatagacataagatgtctatagaggggaaaatgtatctagtatgttgacaa

SEQ ID NO: 4575 - DNA, 661 bp, Homo sapiens
  misc_feature [331]..[331]: Chromosome 13, SNP identification no. = rs8001381
  misc_feature [331]..[331]: allele = t, in linkage disequilibrium with rs9543827, respectively
  misc_feature [331]..[331]: n is a, t, c or g
aaacattgattagctattaaaacaagcacatatcatagagttcaaaatttgcatgaatatctaagctaaagcaaaaatcttcaatgaaagttgacttgttcagagagttgtcacagattttgtgctgctcttgcattaggaataatttggtgaaaaattttagaagcaacgtatgtatgatcccatctaggaaacattccttttcagtgaatattcctgattaacttggcattgcccatcacatcaactgtgatgcatccacagggctgaggaataaatataatgtaccagagaacaaagcataacacatatgtgacagaatcaataaccncttgaacctactagagtaggaaaaaaaggtcattttggggggattaagaacttttgagagagttgatagcctgaggcaaagccaagggctatttgtaccatgcagtcattagctttctgaaatagctacctgtgacctctttaccaaagtaatgtgcacgcatgttggtaatagcagagaggcagacagcttgctaatatactcttaactggccaacgtggtgcttaaggcaaaggagaaatgtatatctttctcttttcatcaccttcacagacacagcaaataatcctagagttgtcttgcagttttggaagcagctgtagaaatcac

SEQ ID NO: 4576 - DNA, 661 bp, Homo sapiens
  misc_feature [331]..[331]: Chromosome 13, SNP identification no. = rs8002274
  misc_feature [331]..[331]: allele = a, in linkage disequilibrium with rs9543827, respectively
  misc_feature [331]..[331]: n is a, t, c or g
gattaagaacttttgagagagttgatagcctgaggcaaagccaagggctatttgtaccatgcagtcattagctttctgaaatagctacctgtgacctctttaccaaagtaatgtgcacgcatgttggtaatagcagagaggcagacagcttgctaatatactcttaactggccaacgtggtgcttaaggcaaaggagaaatgtatatctttctcttttcatcaccttcacagacacagcaaataatcctagagttgtcttgcagttttggaagcagctgtagaaatcacagtgctttcaaactgaggattgaaatgcactagaaggtagcnaaaacacttcactgggtcaattcattttttttaattaaataaaataaagtatgtcaataaaatataatagaatgtcaaggaaaataccagaaagttttgtattttgtaaaactaagtaccgtttttttgttattttttgtttcagttatctgaaccttttgtttccatcatctgtgaagtggttccaaatatgtatgtagcagattggtcctcgtgtaaaatgattttttttattgtgggttgcagtcaaaaaatcttaaaagcccctgataggaagtaccctttgattttacagataataaaactttagtccaaagagtttacaagctt

SEQ ID NO: 4577 - DNA, 661 bp, Homo sapiens
  misc_feature [331]..[331]: Chromosome 13, SNP identification no. = rs8002759
  misc_feature [331]..[331]: allele = t, in linkage disequilibrium with rs9543827, respectively
  misc_feature [331]..[331]: n is a, t, c or g
cagaaagttttgtattttgtaaaactaagtaccgtttttttgttattttttgtttcagttatctgaaccttttgtttccatcatctgtgaagtggttccaaatatgtatgtagcagattggtcctcgtgtaaaatgattttttttattgtgggttgcagtcaaaaaatcttaaaagcccctgataggaagtaccctttgattttacagataataaaactttagtccaaagagtttacaagctttgcataagcatatcatgaatttttgttaatattaggcctcaaagtagcaatcaggtttcctggttcactccaaatttttcttttctgncaaatttctctgcattgccaagtgatcagaaccttgagaatatatatatttttaagaaatatcagccatgcacagtggctgatatcacacctataatccttgcactttggaagtctgaggctggaggattgcttgagcccaggagtttgagatcagcttgggcaacacagtgagatcccatctccacaaaaatttaaaaattagccaggcatggtggcatgtggctgtagtctcagctacttgggaggctgaggtaagaggatcacttgagcccaggagttccagtctccagtgagccactgcactccagcctggctgacagagagatcc

SEQ ID NO: 4578 - DNA, 661 bp, Homo sapiens
  misc_feature [331]..[331]: Chromosome 13, SNP identification no. = rs7139749
  misc_feature [331]..[331]: allele = c, in linkage disequilibrium with rs9543827, respectively
  misc_feature [331]..[331]: n is a, t, c or g
ttaaatttcaggcttgtggtggtctccaacccatcctccataaagctgccagagggtccttcttaagaatcacacctaatcacaaagtttatatacttagtttttccattacctacagaaccaagtatacactccttagaaggatatgttcagttcttccaagatgattctagtctaccttcccaaagtcatttccacccactcattatccaccctaggttctgttacatgtacatttctatccatttcccaaaacttcaatgtacgttcacatctttgttcattctgtttctccacttagcataatcctgctcatccttcaaggttcagntcaactatttcctctgaggctttctcttacctgccctgcatttcccgagagcataattaaccttatatatatcctcactaccctaagattccctttatacttttagtatagcattaccatacaatgttgtagttgtttacatattcatttatgcaaaaaaggtttttgcatcagttatgtgccaggttctctgctaattccttcaaatttaatcataagcaagataggtacagagtttgtcctattttaccttctagactaagctgcttatggttggttagagaatatgtcttgtttatctttgtatcctcaggttagattagagcctag

SEQ ID NO: 4579 - DNA, 661 bp, Homo sapiens
  misc_feature [331]..[331]: Chromosome 13, SNP identification no. = rs4885246
  misc_feature [331]..[331]: allele = c, in linkage disequilibrium with rs9543827, respectively
  misc_feature [331]..[331]: n is a, t, c or g
tacttaaacttacgtatttctcgttcaacttattctttggtgttttgttgcaattttgtgtacatatgtttctgtgtggatgtgtgggtgtgtttgtaactagcactattattttcttgtttctaatagattttcagttgatgctcttcaattattaaaacacattacttacataggatgcttttaactttactttctaacatgtttacttatttttctcttgttcagttgtatcagttcacaattccagagagaaaaagttatagaagtgatgaaagcatactttacttggcattaggacatcccctaagtgtttgccattaagcataanggcttctgtttgatctacatgcacgcgcgtacacacacagacacacacgtggatatacgtgttttaggttatatatttaagatatttatacatatatgttataaataactatcactaaatctatcacacacacataccaggaagggatataaaaatattcacacaagttttaggcaatagaagttgttctatcaaatgctttttggagacactattgaagtgatatgatttttatcttattaatatggtgaattgtattagcataccttctaatagtaaagcattactgtattcctgagataaaccccattattggtgctgctttattct

SEQ ID NO: 4580 - DNA, 661 bp, Homo sapiens
  misc_feature [331]..[331]: Chromosome 13, SNP identification no. = rs505836
  misc_feature [331]..[331]: allele = g, in linkage disequilibrium with rs9543827, respectively
  misc_feature [331]..[331]: n is a, t, c or g
tttttggagacactattgaagtgatatgatttttatcttattaatatggtgaattgtattagcataccttctaatagtaaagcattactgtattcctgagataaaccccattattggtgctgctttattcttttaatcccatacttaagcacattctgtagttttaaaggttttgtaatagtggtggcacctacacttgctgctgtaaccaaaatgtttatgcatatgtgtgtgagtgaaagtgtgtgttattttcaggtttagatttcaaagtgatactgttcctattaaaatatgaaaaaatgaagatttttctttcttctgcatgtcnttaaaaagacagacaaaaagcaaaccctgaaggtttaaaaatacttacatgtgaaatcatttgaggcctgattttaatcaatttcctctatgattatccatctatttggatttttcctccctttctgccctcatttagataaaatatattttcagataattctctgatctgtagattctttcaaatgtgtttgtatgcagttttgcaaagtatacttttccgactcttaagtttcttttacatctctagctatttcctggtattccattttaacattcactcacatttttccttgattaggccacttagtgatgtatatactttatcgta

SEQ ID NO: 4581 - DNA, 661 bp, Homo sapiens
  misc_feature [331]..[331]: Chromosome 13, SNP identification no. = rs4885249
  misc_feature [331]..[331]: allele = t, in linkage disequilibrium with rs9543827, respectively
  misc_feature [331]..[331]: n is a, t, c or g
tgattaggccacttagtgatgtatatactttatcgtatacaggtatgtttgttttcaaagaaccagctgttagactggaaaacaaaaacccacgagaaaaatgagtggatagaaaccaggaccagatttctctgaatcaaaaaataaaaactcttaaatgagctgcctctctagaaccacaaatataataatagcaagtatttataaggtgctttccatgtataaggcactattttaagtgctttaaataagttaactcattggtcctcacgacatctctatcaaatagaacgattactatccccattctgagataaagaactaaggcacngaaaaattaccagttcacagagctggtaaaaggtagtagttcaaagtagggacataaaagcccaaggaagctgtgacacaaggaaatacaacagcttgtagagagaaaaataaaaccttcacagttatgatcacagaaaaattgggacgttgataacagaccaagaaggaaaatagacactgtgaaaacatagtgaaaatcataaagtacaggggaaaaaagagcaagtacaacaaagaaatatagttaaaaattaatgtagaaaaaaatagcagacataaaaagcatataaggatatctaaatatgcataatgagtatcccaaagagaa

SEQ ID NO: 4582 - DNA, 661 bp, Homo sapiens
  misc_feature [331]..[331]: Chromosome 13, SNP identification no. = rs12860514
  misc_feature [331]..[331]: allele = t, in linkage disequilibrium with rs9543827, respectively
  misc_feature [331]..[331]: n is a, t, c or g
gtatacaggtatgtttgttttcaaagaaccagctgttagactggaaaacaaaaacccacgagaaaaatgagtggatagaaaccaggaccagatttctctgaatcaaaaaataaaaactcttaaatgagctgcctctctagaaccacaaatataataatagcaagtatttataaggtgctttccatgtataaggcactattttaagtgctttaaataagttaactcattggtcctcacgacatctctatcaaatagaacgattactatccccattctgagataaagaactaaggcactgaaaaattaccagttcacagagctggtaaaaggnagtagttcaaagtagggacataaaagcccaaggaagctgtgacacaaggaaatacaacagcttgtagagagaaaaataaaaccttcacagttatgatcacagaaaaattgggacgttgataacagaccaagaaggaaaatagacactgtgaaaacatagtgaaaatcataaagtacaggggaaaaaagagcaagtacaacaaagaaatatagttaaaaattaatgtagaaaaaaatagcagacataaaaagcatataaggatatctaaatatgcataatgagtatcccaaagagaagaattgaaatggtagatcataaaaatatttacag

SEQ ID NO: 4583 - DNA, 661 bp, Homo sapiens
  misc_feature [331]..[331]: Chromosome 13, SNP identification no. = rs1417552
  misc_feature [331]..[331]: allele = g, in linkage disequilibrium with rs9543827, respectively
  misc_feature [331]..[331]: n is a, t, c or g
gcaagtatttataaggtgctttccatgtataaggcactattttaagtgctttaaataagttaactcattggtcctcacgacatctctatcaaatagaacgattactatccccattctgagataaagaactaaggcactgaaaaattaccagttcacagagctggtaaaaggtagtagttcaaagtagggacataaaagcccaaggaagctgtgacacaaggaaatacaacagcttgtagagagaaaaataaaaccttcacagttatgatcacagaaaaattgggacgttgataacagaccaagaaggaaaatagacactgtgaaaacatantgaaaatcataaagtacaggggaaaaaagagcaagtacaacaaagaaatatagttaaaaattaatgtagaaaaaaatagcagacataaaaagcatataaggatatctaaatatgcataatgagtatcccaaagagaagaattgaaatggtagatcataaaaatatttacagatataactcaagaaaccttgccagaaaaaaaaaaagcttgaatctatagacattaaaggacatattttcacaggggcattaacacaaaaggctgtacaccaagagataccctacctagtaaagctattggaatgagaagaaagtagccattcagacaaa

SEQ ID NO: 4584 - DNA, 661 bp, Homo sapiens
  misc_feature [331]..[331]: Chromosome 13, SNP identification no. = rs12867084
  misc_feature [331]..[331]: allele = t, in linkage disequilibrium with rs9543827, respectively
  misc_feature [331]..[331]: n is a, t, c or g
cacaaggaaatacaacagcttgtagagagaaaaataaaaccttcacagttatgatcacagaaaaattgggacgttgataacagaccaagaaggaaaatagacactgtgaaaacatagtgaaaatcataaagtacaggggaaaaaagagcaagtacaacaaagaaatatagttaaaaattaatgtagaaaaaaatagcagacataaaaagcatataaggatatctaaatatgcataatgagtatcccaaagagaagaattgaaatggtagatcataaaaatatttacagatataactcaagaaaccttgccagaaaaaaaaaaagcttgaanctatagacattaaaggacatattttcacaggggcattaacacaaaaggctgtacaccaagagataccctacctagtaaagctattggaatgagaagaaagtagccattcagacaaaaagatcaagctacctttttttttttttcattgcagaaaaggctttactaagtatctcataaaaaaatagaaaccatgaaataagtatccattttctctaaataaacattttaaacttccatatagaaatgtatcataaataaggatgaaagagaaatacaaatttggggaaatatttgcaaaacaaaagattaatccctgaaacataaagagct

SEQ ID NO: 4585 - DNA, 661 bp, Homo sapiens
  misc_feature [331]..[331]: Chromosome 13, SNP identification no. = rs700349
  misc_feature [331]..[331]: allele = a, in linkage disequilibrium with rs9543827, respectively
  misc_feature [331]..[331]: n is a, t, c or g
ccttaagttgtagtagaggagggtggtcttttaccctggaaaaagcccctgctctgtggggtatcaatatgcccaactgccaattgacatttctcagtcctcattgcagatgggaggaggtaggttgtgagatgtgtcagagagtcacttggtgagggttttaggaaaacacttacacagctacacagcaatatttctcttttctccattcattgtgatccctcagtgacagttctgtaatcctgtatgactttgagaatatgttaagagtggtatgacaaagataaaagaggcctggagtgttgatgacaatgtggagccacctggactncccatcattgtaatgagtaaaaaataagcttgccccttgtttaaaccctgttgtttcatgtctttgctgcaagcagctgaatgcagtttccacctggcacagtcacatttcaggagcacatttgttttctcactcttctctccagcaccctaccttgactccggtagtcctttagaatgctcatatctctataattcagaaaatatgaaaaaaaagaaaacaacaaaaaacccagaactaaatcctttccttataccacttctgattttggaaatctcccaattccttatagctctctagagccacttttctcaaaaaaaaaaaaaaaaa

SEQ ID NO: 4586 - DNA, 661 bp, Homo sapiens
  misc_feature [331]..[331]: Chromosome 13, SNP identification no. = rs912924
  misc_feature [331]..[331]: allele = g, in linkage disequilibrium with rs9543827, respectively
  misc_feature [331]..[331]: n is a, t, c or g
ggcttctgtttcctgtggcatccactgaattaccaatttcctttgattccaagaggagattagctagtccaataaagtgtttacatgagactttagagacacaaggatacttaatgttaatttagacaaagtgctgcatttgggagacaaggaaggtaaggcccagaaaatgggagtagcatgaccaaagtcagagttcacagaagtaactcacagcccagaagtaactcacagctggggctactgcaccccagcctagttctacttgcaggaaaccacaattcacgccttcttaggcttgatggaatttgtagataggtagtatttatanaaacgtgaactctcttcaacaacaacttggagatggtcagtccagatagctgcacattgtcatcaactcgccagccctcttttgtctttctgttataccactcttaacatattctcaaagtcacacaggattatagaagtgtcactgtcattcattttacttatagtctcctagaccaaggctttaacccctagtggaaactccaaagggtgagaacttcagattcctatggcaaactggacaggcccatgtcaacctgaaaacacacacacacacacacacacacacacactagagaaaattttctgtaaatatgttttgtttactcag

SEQ ID NO: 4587 - DNA, 661 bp, Homo sapiens
  misc_feature [331]..[331]: Chromosome 13, SNP identification no. = rs9573451
  misc_feature [331]..[331]: allele = c, in linkage disequilibrium with rs9543827, respectively
  misc_feature [331]..[331]: n is a, t, c or g
tgctaggattacaggcatgagccaccgtgcccggcatgatttatattcttttaggtatatacccgacaatgggatcgctgggttgaatagtcattctgtttcaagttatttgaggaatcaccacactactttccacaatggctgagctaattcacagccccatcaacagtgtataagtgttcccttttctccacagccttgccagcatgttgtttattgcctttctaacagccaatgtatggtcttttcaacaaatggatacacagttgctgtgacaactggatacacacaggcaaattaatgaatttggacccctatcttacctaaagantcaaagacagatttaagagctagaactataaatgtcataaaagatataggcataaattttttgacattgaattaagcaatgatttcctagaagtaatatcaaaaacatgaaacaaccaaagaaaaaataggtaacttacacttcttcaaagcttaaaatttgtatatgccaaaagctactgtaaagaaagtatttttaaaaagagcccacaatatgagaaaatatttgcaaattatgtatctgataagaaactagcgttcaccatatataatgagcacttataatccagcattacaaagataaataacccaattttaaaatgggcaaaag

SEQ ID NO: 4588 - DNA, 661 bp, Homo sapiens
  misc_feature [331]..[331]: Chromosome 13, SNP identification no. = rs4885250
  misc_feature [331]..[331]: allele = t, in linkage disequilibrium with rs9543827, respectively
  misc_feature [331]..[331]: n is a, t, c or g
aaagaaaggaggtgagaagtgaaagttctgatttccagccatagactcagaagggtagaattatacagaaatatatatatacaaacacacacacacacacacacacacacacacagagagagagagagagagagagagagagagagagagagaaatgagacgttggctgtgtgagattgcagaccttctaataaaggaatcactaaactggcacaaattaccaaaaataaaattatttaataatgtctctggaaattgagctaagaagaggcaataagttgagaagcatttataaaaaaaaaaaaaacttcagaatttcagtaagaacagnggtagtctgtggcacttgagccagaaactgctgtcatcaccactcccaacttttagtcagtgttgcaggtttattttaggcaggcaaggccaagaagagggtggcatttttcaccctactccctccattacctctcagctgtagggcaatggtttcactctgggaggggcagataaggctcccttataacctccttcaagatctatgttccatataatctactccagaagggttcagctaagatagctctctgcccagctctcactcatagggtgaaggctttttcctggtcagacactgcaagccatgaactgtaggccaaagagactt

SEQ ID NO: 4589 - DNA, 661 bp, Homo sapiens
  misc_feature [331]..[331]: Chromosome 13, SNP identification no. = rs356737
  misc_feature [331]..[331]: allele = a, in linkage disequilibrium with rs9543827, respectively
  misc_feature [331]..[331]: n is a, t, c or g
ctgtatgttagacattgtagacaaagatttaaagaagttactatatgtgcaaagaactagagaaaccatgtgtaaaataaagaaaaatagaatttaaatacagaatattaataagcatttagaaattattaaaaaattgaaatttttggagttgaaatctgtaactgaaatgaaaaattcactgaaatgaaaaaaaaaaactccacagtagctttgacctagaagaaacaaatcagagaaactcaataaaaaagatatttaatgtgaagaacgtaagttttaaaagaataaaataaatgcatacagcctcagagaactgagagcagcagcntctgtataactgggagtaacagaagaaggcaatgtggcagaaaaaaacagtcaaggaaataatgcctgaaactctccaaatatctacagacaagcaaatgctgagggtacaaagaagcacataagctcaaaataaaagggatggaggaagatctaccaagcaaatggaaagcaaaaaaaaagcaggggttgcaatcttagtctctgatgaaacagactttaaaccaacaaagatcaaaagagacaaagaaggccattacataatggtaaagggatcaatgcaacaagaagagataaactatcctaaatatatatgcacccaatacaggag

SEQ ID NO: 4590 - DNA, 661 bp, Homo sapiens
  misc_feature [331]..[331]: Chromosome 13, SNP identification no. = rs356705
  misc_feature [331]..[331]: allele = a, in linkage disequilibrium with rs9543827, respectively
  misc_feature [331]..[331]: n is a, t, c or g
gcgggcagatcatgaggtcaggagatcgagaccatccttgctgacacggtgaaagcccgtctctactaaaaatacaaaaaatttagccaggcaaggtggcaggcacctgtagtcccagctactcaggaggctgaggcaggagaatggcgtgaacccaggaggcgaagcttgcagtgagctgagatcgtgccactgcactccagcttgggcaacagagcaagactctgtctcaaaaaaagaaagaaagaaagaaacattgtcagccaaaacttaaatattagaatcaacctaaaagtgtagatgaatagttaaataaattattcatgaaatnaaaaaagatgctaacatttgaaactgatctaagaagcttttcctatagaaaaataaaataaaataaacatgtacagtcaaaaaagaaaatatattaggccataaaataaggctcaacaatttatttacttatttatatttaattgtattttattgtaagttctgggatacatgtgcagaatgtgcaggtttgttacataggtagacctgtgccatggtggtttgctgcacctatcaacccatcacctaagtattaagccccacatgcattagctatttatcctgatattctccctccctgcaccccacctacaggcccctgtgtgtgttg

SEQ ID NO: 4591 - DNA, 661 bp, Homo sapiens
  misc_feature [331]..[331]: Chromosome 13, SNP identification no. = rs4885252
  misc_feature [331]..[331]: allele = a, in linkage disequilibrium with rs9543827, respectively
  misc_feature [331]..[331]: n is a, t, c or g
gctggtagtctataattttaaataataaggtttctcggtaaatggccaaagtaagagattgttaggacagcttacagtggtagtgtgttcttaggagacattgaatcagtagttgtaaaagtcttctcaaagtgagcatcaggacttgaggattttacagaaaagccccagccagactcaaaaaaaagtatgctgactgatgtgtccccttgtacaactcttccagaaagatggaaagagagcatccccctattcattgcacaaaactgctataaccttaataccattgccacctggaaatctcccttgtttcttatgaattaaaaaaaancatagaaggcataggtttatatctatccagggtggggcgcccctcagcattggttatcactattttactaatagaaacggaggcacagagaagtaactttttgtaggtcacatagctaacagtcacaaagttaggatatgaagccaagcattctggttctagaaatttatgttcatattcattgttgaacactcaacatctagcaaggttcctgtttggcataaagtagattctcagtaagtgataggttaaattgctgatatgacattcatatttgggtcagccagtctaccttaatcatcagtagtgagatatcttgaatatacagat

SEQ ID NO: 4592 - DNA, 661 bp, Homo sapiens
  misc_feature [331]..[331]: Chromosome 13, SNP identification no. = rs4883983
  misc_feature [331]..[331]: allele = c, in linkage disequilibrium with rs9543827, respectively
  misc_feature [331]..[331]: n is a, t, c or g
aaaaacatagaaggcataggtttatatctatccagggtggggcgcccctcagcattggttatcactattttactaatagaaacggaggcacagagaagtaactttttgtaggtcacatagctaacagtcacaaagttaggatatgaagccaagcattctggttctagaaatttatgttcatattcattgttgaacactcaacatctagcaaggttcctgtttggcataaagtagattctcagtaagtgataggttaaattgctgatatgacattcatatttgggtcagccagtctaccttaatcatcagtagtgagatatcttgaatatanagatctataaaaattttaaaaggctctcttgttttcctagtattatatactaaatttatattacatataaaattactgactttgtacatttatattctaaaagattgtctcttttgttaatgaaattaaaatttgttattatataataatgaaaatgctttagaaatataacaatgaggctggacatggtggctcatgcctgtaattccagcacttggaaggccgaggtggggggatcacttgaggtcaggagttcaggaccagcctggccaacagggtgaaaccccatctctactaaaaatacaaaaattagacaggcatggtggcacg

SEQ ID NO: 4593 - DNA, 661 bp, Homo sapiens
  misc_feature [331]..[331]: Chromosome 13, SNP identification no. = rs9543803
  misc_feature [331]..[331]: allele = g, in linkage disequilibrium with rs9543827, respectively
  misc_feature [331]..[331]: n is a, t, c or g
taaaatactgtacctagaaaaatgtgttttaaaattgaaggcaaaatgaatacttttaaagacaaacaaaagaaaataaaatttatggcaaagagccctacactacataaaatatttaaggaagatttttttccccaccaaagagaatgtgatagcaggtgaaaagttgcatcagcatgaagaaatgaacagtgccagaaatggcatcaatgtgggtaaatatttaaaaagaaaacatttactttattttatattctctttaaaggataattgacatgtcacaaatttgtacaatatgccacatatcacaagcccacagttaatatcatantcaatgacaaaaacttacaagctttttctccaaggtaaggaacatgacagggatactcattcaccacgtctaggaagtcctagccagagcaatttggcaagaaataaaaggcatccaaattggaaaggaaaaagtaaaattgtttgcagattacatgaaaaaaaatatatctgtagaaactctaccagaaaatttttacaacaacaaattctagaaaatttcagcatacaaaatcaacataaaaaatcaatagtgtttctatacattaacaactaattatccaaaaaataaattcagaaaataatcacatctacaatagcatcaaaaaca

SEQ ID NO: 4594 - DNA, 661 bp, Homo sapiens
  misc_feature [331]..[331]: Chromosome 13, SNP identification no. = rs1592012
  misc_feature [331]..[331]: allele = a, in linkage disequilibrium with rs9543827, respectively
  misc_feature [331]..[331]: n is a, t, c or g
taaaaggcatccaaattggaaaggaaaaagtaaaattgtttgcagattacatgaaaaaaaatatatctgtagaaactctaccagaaaatttttacaacaacaaattctagaaaatttcagcatacaaaatcaacataaaaaatcaatagtgtttctatacattaacaactaattatccaaaaaataaattcagaaaataatcacatctacaatagcatcaaaaacaataaaattcttaggaataaacctacccaagaaggtgaaagatctatgtaatgaaaaccataaaatgttaatgaaagaaattgaatgggacacaagtaaatggaangatagcacatgttcatgggtcagaagaatcattgtcaatctcgccataacatgcaaagcaaccaataacttcagtgcaatctctataaaattccaatggcaattttacagaaatagaaaaaccgattctaaaatttctgcagaaccagcaaaggccacaaatatctaaagcaatcttgagcaaggagaccataactggaggcatcccactttctgatttcaatttatattaaaaagctatagtaatcagtataatataaagctatcgaatggtactggcataaaaatagatgcatagatcaatggagcagaatagtaaacacagaaataa

SEQ ID NO: 4595 - DNA, 661 bp, Homo sapiens
  misc_feature [331]..[331]: Chromosome 13, SNP identification no. = rs496836
  misc_feature [331]..[331]: allele = g, in linkage disequilibrium with rs9543827, respectively
  misc_feature [331]..[331]: n is a, t, c or g
acccacaatattgtctatattggtgaatgttttatgtgtacttgaaaataatgtatattttgctgttttagggttgagtgttcttttaaatgtctattacaataatttggttgattgtgctatttatgttgtctacaactctactgattttctgcctgccttttctatcaattaatgagagacaaatgttaatctccaactataatgttagacttgtttctttctcctttcctttctatcttttttgtattacatattttgtaactgtcttgttatgtacaagcacatttaagataattaagtcatctttatcccattagtcactggaaanattcttcatgctgtaatctattttgtctggattaatatagccactctgactttttaaaaattactgtttgtatgataaggcttttatacgttcttttaatttcaatccatatccttatgtttaagatgatctctcaaagacagcatataattgtgtcatcttttatccagtgacaattgaagagactatatcatttacatttaatgtaattatcaacatggttggcttgaaatctaccatttttccaattcatttctattctattgctctttagtccgtttttgtttcacattttgaataaattgagtattttttgattctaatttatct

SEQ ID NO: 4596 - DNA, 661 bp, Homo sapiens
  misc_feature [331]..[331]: Chromosome 13, SNP identification no. = rs1832732
  misc_feature [331]..[331]: allele = a, in linkage disequilibrium with rs9543827, respectively
  misc_feature [331]..[331]: n is a, t, c or g
ttcttcagaatagtctctttttatctgtagtatcaggagcagtgtcccctcgttcattctgatatttttccttatcggtgtggctagatcaattttattaaccttctggaaccagcttttatttatattggtttttctcaactgttttcctgtttgttgttgttgttgttgttgttcactgatatcttttatttgtatttgttccctcagtcttattctgggtttaatttgctgctctttagtttctcagagttggatcttagattactgatttgaaacttttcttctttctacataagcatttaatgctgtggatttccctcctatcacnacctatcacaaatttgatatgttgttcttttattatcattcagttaaaatattttccatttttattttttcttcgctccatatatttttttagaataatatgatttaatttctaaatctttgcaggttttctatattctattgctttctactttaatattctggtcaaatgacattttcttttaatgaattcagttctctcaaaattggtaaaaaatagttcaagacccacaatattgtctatattggtgaatgttttatgtgtacttgaaaataatgtatattttgctgttttagggttgagtgttcttttaaatgtctattacaataa

SEQ ID NO: 4597 - DNA, 661 bp, Homo sapiens
  misc_feature [331]..[331]: Chromosome 13, SNP identification no. = rs356749
  misc_feature [331]..[331]: allele = c, in linkage disequilibrium with rs9543827, respectively
  misc_feature [331]..[331]: n is a, t, c or g
gaatctagagaggcagtctggctacagtggctttgccaagctgcagtgggctctgcctagtccaaacttctgggtgactttgtttacactgtaaggggaaaattgcctactcaagcctcagtaatggtggacaccctttcccccaataagctcaagcatcctaggtcaacttcggactgctgccctggcagtaagaacttcaagccagtggatcttagcttgctgggctccattgtggtgggatccactgagctagaccactcagctccctggcttcagccccctttccaggagaatgaatggttctgtcttgctggtgttccaggctccnctggagtaagaaaaacaaaaacaaaaacaaaaaaacaaaaaactcctgcagctagctcagtgtctgcccaaatggccacccagctttgtgcttgaaacccagggccctggttgcataggcacccaagggaatctcctgatctgtgggttgcaaagacaatgggaaatgcataggatctgggctagatagctctatccctcagggcacagtccctcagggcttttcttagctaggggagggagttccctgaccccttgtacttcctgacgctccaccctgcttcggcttgccctccatgggctgcacccactctctaaccagtcccagtga

SEQ ID NO: 4598 - DNA, 661 bp, Homo sapiens
  misc_feature [331]..[331]: Chromosome 13, SNP identification no. = rs12867583
  misc_feature [331]..[331]: allele = t, in linkage disequilibrium with rs9543827, respectively
  misc_feature [331]..[331]: n is a, t, c or g
atttgatgtcctctataaacaaggtgtccacacttgaaaaggagcccaaagagcgacaatggcccagtatagaggactgcttctcacacttctgggataaagcactgatttgtatgagtgtacatgtgtgcgtgcacccaattcatcacaaattgttactttgtaaaacacactaattcagaaaaatgaaataaagaagacgtacaaaatacaaacccaaactttaagtattacagtcagctaaaataaaatcctctgattcatggcttaagtgattctaaacacttaccttcaatttctgtccacaccttcctcacaagccagaaacagnggaccgactgctccggagagaagacctccacacttgaagtagctctggttttgagtggagcgtctcaaacttatgaggatcacctggtgagcctgttaaacacaaatccctgagccgcaccctcagaaagtctgattgaatcaacctggaggagggatagagaattcgcttttctgacaagctcacaggtgttaccaatgtagaagcggcagcactatagaaggcttgatgtactatatggtatcattgcctaatgctctcagtatggacatcctgttacactaaaccataaaaatcctgagagctgggcagggatacaattttgcccag

SEQ ID NO: 4599 - DNA, 661 bp, Homo sapiens
  misc_feature [331]..[331]: Chromosome 13, SNP identification no. = rs1934869
  misc_feature [331]..[331]: allele = a, in linkage disequilibrium with rs9543827, respectively
  misc_feature [331]..[331]: n is a, t, c or g
gagctgcttccagctaaatagtagttatgagaaaaaaatccctgaaatcacgaatcttgtcaatggaaaaatacaatttgatttgacatataggttctgtctatttgctattttataggtacatatatgcatatatttaacaaaaaaaagtcttttaggaatgcatctattaaagaaagcagggtagattacaatgtctcagaagaggggatgcatgcaatggaaacagcagcattctggaaccagaataagaatcagataacctgggtttgaatcctgacaccaccttttagtactggtatgattttgaataaacagttttatgggtttnttcacagtttcttcaactgcgacctgtttaaaataatgtttgtcatgttgcaaaggttacataaaaattttaaatgcctggtactcctatcagagactctaagaaaaaaaaaatctctactaggataactttgcttcccctgagaaactgtgatacttctttttttaagagaagaattatgtagccatgcttttcttccattttgcttcacctgctaaaaaattcagagccaatttggggctcaactgtaagaactgggctgaccctgatactctgtgaatgtgtgttcttcctttccctggtattgaatttccagcttcatttaaaatt

SEQ ID NO: 4600 - DNA, 661 bp, Homo sapiens
  misc_feature [331]..[331]: Chromosome 13, SNP identification no. = rs12858683
  misc_feature [331]..[331]: allele = t, in linkage disequilibrium with rs9543827, respectively
  misc_feature [331]..[331]: n is a, t, c or g
atgtctcagaagaggggatgcatgcaatggaaacagcagcattctggaaccagaataagaatcagataacctgggtttgaatcctgacaccaccttttagtactggtatgattttgaataaacagttttatgggtttgttcacagtttcttcaactgcgacctgtttaaaataatgtttgtcatgttgcaaaggttacataaaaattttaaatgcctggtactcctatcagagactctaagaaaaaaaaaatctctactaggataactttgcttcccctgagaaactgtgatacttctttttttaagagaagaattatgtagccatgcttntcttccattttgcttcacctgctaaaaaattcagagccaatttggggctcaactgtaagaactgggctgaccctgatactctgtgaatgtgtgttcttcctttccctggtattgaatttccagcttcatttaaaatttccctgatctttattttaattaccttttttaacatgtgtgttctcatctaagctgttctcaattctttgtggagagaagtagtagagttgagaggaagatgcagggaagggaggaagaggaaggagaagatttgaggagaatggataagagaatgaatctaatatttttttccataaatgctcacaggcagtt

SEQ ID NO: 4601 - DNA, 661 bp, Homo sapiens
  misc_feature [331]..[331]: Chromosome 13, SNP identification no. = rs1340911
  misc_feature [331]..[331]: allele = a, in linkage disequilibrium with rs9543827, respectively
  misc_feature [331]..[331]: n is a, t, c or g
tccagcttcatttaaaatttccctgatctttattttaattaccttttttaacatgtgtgttctcatctaagctgttctcaattctttgtggagagaagtagtagagttgagaggaagatgcagggaagggaggaagaggaaggagaagatttgaggagaatggataagagaatgaatctaatatttttttccataaatgctcacaggcagttgtaaaaagaaaaacataatattctctatctagttgatcatagcttctgggaactgctgtattgggatgtttaattaataacactttatatctgcagtataccattgctttcccaagtcnctgtgtctgtgatgtgagagtgtcacagacaacacagtcttgttacagagtgtcttttctggcaatttcaagaaggcaccagcaaggactgagaagcacacagtctctcctcttctctctctctcaatctctctctctcttttattacagtttgggttaaatataatacactggagccttgctataacaaccagtctttgccaccagccacataatttatttatgtacctagaaatattcctgtaaaatatctatgtactatagatggatagataaatggtaactgatagctgaaagaaaaatagtctagacctcagaggaatctaataa

SEQ ID NO: 4602 - DNA, 661 bp, Homo sapiens
  misc_feature [331]..[331]: Chromosome 13, SNP identification no. = rs17195609
  misc_feature [331]..[331]: allele = a, in linkage disequilibrium with rs9543827, respectively
  misc_feature [331]..[331]: n is a, t, c or g
aagacaaattcctcctcctcctcgtccttcctgtactccatccccaactcctccattaggtaattcatgttcagaaattactcttccactccctgcctcattgctttcaatgaatcagcctggctgccctgcagacttgcgtatgcatggaagaagttgatgggatggtcagaattgactcaagatatgagatctcaccctacagctctcacacagttttttttacaacctcctctctgcttgaaaagctctctgcccatgcctttatcacagatcttagctcatcaatgtgtaactagttgatttatgtctctccatttttggtatttgnacacctcaagggtacagaaaatgtaatccagatttttagagtatgtttctgaataggctccacttaattcatttggaaaatagtcattaagcatctactgtgtgctatgtgctaaagatacaattgtaaagatgacagaactgtccctcaagcagctagggaccacagaccagaagggcaaaatgctgttatagtgtaagttcagacaccatatataaaagcacatgcaaaagtgtttaatcaccaggaagacagaatgaaaaacaaggcagagactaaggagagacaagctaagtgcttaaagcacgacatttaaggagacataaactc

SEQ ID NO: 4603 - DNA, 661 bp, Homo sapiens
  misc_feature [331]..[331]: Chromosome 13, SNP identification no. = rs17195616
  misc_feature [331]..[331]: allele = g, in linkage disequilibrium with rs9543827, respectively
  misc_feature [331]..[331]: n is a, t, c or g
ccccaactcctccattaggtaattcatgttcagaaattactcttccactccctgcctcattgctttcaatgaatcagcctggctgccctgcagacttgcgtatgcatggaagaagttgatgggatggtcagaattgactcaagatatgagatctcaccctacagctctcacacagttttttttacaacctcctctctgcttgaaaagctctctgcccatgcctttatcacagatcttagctcatcaatgtgtaactagttgatttatgtctctccatttttggtatttgaacacctcaagggtacagaaaatgtaatccagatttttagantatgtttctgaataggctccacttaattcatttggaaaatagtcattaagcatctactgtgtgctatgtgctaaagatacaattgtaaagatgacagaactgtccctcaagcagctagggaccacagaccagaagggcaaaatgctgttatagtgtaagttcagacaccatatataaaagcacatgcaaaagtgtttaatcaccaggaagacagaatgaaaaacaaggcagagactaaggagagacaagctaagtgcttaaagcacgacatttaaggagacataaactcttagagccatgcaagtgtagggtgagcacctgagatgagca

SEQ ID NO: 4604 - DNA, 661 bp, Homo sapiens
  misc_feature [331]..[331]: Chromosome 13, SNP identification no. = rs9600410
  misc_feature [331]..[331]: allele = c, in linkage disequilibrium with rs9543827, respectively
  misc_feature [331]..[331]: n is a, t, c or g
agatatttatacaactgccctcaggatatcctgcaaagataccttcaactagcatgtttctcagttatcctcttctcctttctcaaccttccattctggagtttcctatcataatgaatgacaataagatttatttgtttttatttacattacccagttttaatcctctactttgcaactggtatctatttattatatgtgtgtgcatatgtgtgtatgtgtgagtgtgtttagcaatttgcctctcaatgaaaatgtaaactcccatgaggtcacagtcttgttcgtgctgtattgcctacacttagtacaacagcaggcactcaaatanttttaaacaaatgatcaaatgagttcatgaattttcaacttctctcattccttgcctcttactctacattaactgatataaatcctgtcaattcaatctcctgaatatcattcacacttggttctgtccacaccaccaccactgtatctcaagccatcatcatcttccaccggtattactagaacgatatattgcctgttccccttcctcaagtctcccatttctccaaaacagtcttcttagtgcaatctgagtgctgtagtgctcttactaacatgaaaatcaaccacattcttccactgcttacagcacttcaaagcaatccaaaaa

SEQ ID NO: 4605 - DNA, 661 bp, Homo sapiens
  misc_feature [331]..[331]: Chromosome 13, SNP identification no. = rs7988629
  misc_feature [331]..[331]: allele = c, in linkage disequilibrium with rs9543827, respectively
  misc_feature [331]..[331]: n is a, t, c or g
acaagactgaagagcctgacctcagattgcatctaaagcttcattgtttgccactcatgtgatttggttgtaagtgggccagtgaatcctaattcattttatcctgttgttttattcatttaaagatctaaaatagttttaaatgaatatttaaaaacaaaaataaataccatgccttatattcttggtggatgcatcatcagttagctatcatagcataacaaactacccaaaactcagaatcttaaaagaacagtcttatattatcactcaggtcattgtgtcacctgggctcgcttatgcatctatggtcagctgtggatcactcttngctagccactgttcagctagctataggcatttctaaaatggccttagctgaaacaactaagcccttccacatggtgtctaatcctcggcagactattcacacagctgtagcaaggttccaagagaagaaggaagtgctcgaagccagaatggtgtgtggtcactttcaccaagttctttggccaaagtatgttaaaaagccaatctgtattcaggaggtagaaaaatggaagccatctcttgggaggaaccacaaaatcacattgcaaaagatgtggacacagtgtgaaaaattggggcaacaactactaaaatcctctaagtcatcaaa

SEQ ID NO: 4606 - DNA, 661 bp, Homo sapiens
  misc_feature [331]..[331]: Chromosome 13, SNP identification no. = rs2328930
  misc_feature [331]..[331]: allele = t, in linkage disequilibrium with rs9543827, respectively
  misc_feature [331]..[331]: n is a, t, c or g
cagaagccatattttaccttggtatctagatctcttttggtagaggaagaaggtgcattttttcatatcttgataagatttcaatactcaaatcgtgataaaatctcaactactactcttatacttccaagcgttagtacataagtattatacaaaatgccaggaactcagtaaatggagacattatacaaataaatggatttaggattatggactgcttctcagtgttttgttaggcttgacacatgacagacacaccggattgttcaaagaagggcaggatgtaatttatgggccagcctatgttgtggcatatggacatcttgttccngttaaatgagtcaagctagacacaaaaatctcttgtaaatatgcatgggtgatgcagctcctgataaatagttcaacaggatctgaggcagtttattaccctaaactcttatacttccaagcgttagtacataggtatcatacaaaatgccaggaactcagtaaatggagacattatacaaataaatggatttaggattatggactgcttctcagtgtttagttagtccaacaggatctgaggcagtttagggtaataaatttcctcagatcctgttggactatttactgggagctagggtaatacaattgcacaaaaacagctctatat

SEQ ID NO: 4607 - DNA, 661 bp, Homo sapiens
  misc_feature [331]..[331]: Chromosome 13, SNP identification no. = rs10492517
  misc_feature [331]..[331]: allele = g, in linkage disequilibrium with rs9543827, respectively
  misc_feature [331]..[331]: n is a, t, c or g
ctcccgagtagctgtgactacaggcgcccgccaccacacctgactaattttttgtatttttcatagagatggggtttcaccgtattagccaggatggtctcgatctcctgacctcgtgatctgcccacctcggcctcccaaagtgctgggattacaggcgtgagccaccacgcccggcctgtctagttatttttaattgtcactaacatcctttgaggcaaggaggataaggaatatgtcccacatgacaagggaggaaacagtcctgctggtgaagcactgtgacactttggcgactttgacgccactctgctcttcttgccaattcagnactaggaggcatcctatcctgcctttcaccatagagcaaaccccagagagtgctggggtgaatttctctggaaatgagatcccaggactgtgttgtataggttgtaactctgaaagtgatacgtgctgcctaaaagggccagctttcaactctccacttctaaaaatactcctcctaatagagaaatttaactgaagtccaaaccttccattccacaatgaaagaacctgcagctaatagctcgctggagttcatttacccattgaggttgagtttctggcactttctagagctctttgggtataggcatctctcccatgtctcacagat

SEQ ID NO: 4608 - DNA, 661 bp, Homo sapiens
  misc_feature [331]..[331]: Chromosome 13, SNP identification no. = rs356767
  misc_feature [331]..[331]: allele = c, in linkage disequilibrium with rs9543827, respectively
  misc_feature [331]..[331]: n is a, t, c or g
atatcagagataatataatccagaatagttggtctaagaagtatttgtgtttgccattctttgcctagaaaaagcaaacagcaaaactaaacatccaacagatgaaacaaaggaaaataaaacacattgaccctcctaaaattattttttctcgaaatcaaataaaaatgtatttcctgggccacccagataactttaagcatcctagtcaaagcacttacggcaaatacttaacagaagccatatttcttactgtgtgtggctatttcactctgtcatggaaacaaggactttatagaaatttatgaaaatgggtccaaatatgcatttngacatggctcaagacaatggtttaagtagattaaatttttttttttgttttttccaccattcccttgttttgtctttctctcctcaggtaactcttagcctacttgatgacttcgcctaaatttaatccaataaatacttattgagctcagaacttctttacaggcggatatgtgattaaccaacacgatgcacttctctcaggatgtgaccagtggaggaaggctaggggctgggggtttgtgcttataatgggagaagcttctaaaaacttcatacagaatgtgagagacaggacttacatttccaagcagaggcaggaagaaggaca

SEQ ID NO: 4609 - DNA, 661 bp, Homo sapiens
  misc_feature [331]..[331]: Chromosome 13, SNP identification no. = rs356765
  misc_feature [331]..[331]: allele = g, in linkage disequilibrium with rs9543827, respectively
  misc_feature [331]..[331]: n is a, t, c or g
gttaattggtgcagcaaaccaacacggcacatgtatacatatgtaacaaacctgcacattgtgcacatgtaccctagaacttaaagtataatataataataataataataataataataataataataataataattggaccaaaaaaaaaaaagcaagatggcattcctctggctctctcaggaggcttgcccttggaatctggtcaccatactatgaggtggctcaggccacatggaaaagccacacataggtattcagccccagcagaagtcctagctgacatggattttctgcatgacctattagtgaggaagccattgagatgacnccagtatcatccagtgtctgactgcaaccacatgggagaactttagcaagaaccacctagctaagcccagtcagctccagaaccatgcaaataaaacaaataattgttttaagtcactagtattgggtggtttgttacatagcaatggataactgatttggttaccgtatgtattgcattatctaggacatctgatttaaaccattatatttttctaataatagtgaataattctatggtacttattacatgccaaacattgttttatgtgctttacatgtaataactcttttaatcctcacaatgggcttatgaattaggtaccattat

SEQ ID NO: 4610 - DNA, 661 bp, Homo sapiens
  misc_feature [331]..[331]: Chromosome 13, SNP identification no. = rs7991708
  misc_feature [331]..[331]: allele = a, in linkage disequilibrium with rs9543827, respectively
  misc_feature [331]..[331]: n is a, t, c or g
ttgtaagaagattgggtgggatggaaagtattgtctggccatcttttggaactacaacctgccacagtcaactatgcacatagtaagcattcaccaagtactgtggaatggcaaagactacagagtctttggtaagattttttttttactgtaagacaaagaaaacagctcaaactagttaaacaaaccaaaaagtaatttttagaaatttttctaaaatttttctaaaatttttctgtgtcttctcacagaaccctggggaagttaggtctcttgagggacagtttccaggaactgtatctcaccacctccacaactatcattttcatcntagccaccatcatcttttacctgggttgttgccatgtcctaacagctctccccatttcttccctctggtccctacagtctattctccacatggctacttgggatcccttcaatttgtaagttggattctatcacctatttgctccaaacctccaaaccttgcagaatgctcccatcaaattcagacaaacctccaaagaccttaccttggccctcaaggccctctatgatctttcttttggtgtctgtttgccaccatcacctgccatgcttgtctttgaatcccctactctcacctcttccttgaacatccaagcatgtcccaccttga

SEQ ID NO: 4611 - DNA, 661 bp, Homo sapiens
  misc_feature [331]..[331]: Chromosome 13, SNP identification no. = rs4885259
  misc_feature [331]..[331]: allele = c, in linkage disequilibrium with rs9543827, respectively
  misc_feature [331]..[331]: n is a, t, c or g
tgtatccatcagaacccaaggaaagctttcattaagaaaaagatttgggagatagttagttacaattggacacacttaaattgtttctcttagaaatatgtattccttgttattttttttaatcttcttactttcagtgtgttttactctcctaaaaatctaattatctagtgtgtttcactttcacagaaaaaaagcaaatattctgagcccccatctcagaaaaccagagcaggggctggtggtttcagggttttttactcccttgagtttacaagaagggataatgaagacataatgcacataaggcaggcctcagggaggctctgcnataacaccaaacttgccactgaaaatctttaaaagtttgtggccagtatcagatacccaagatgaaattaaccaagagtattttattcccttccatcctgtaaaatttattaagcatctagatctaatatgtgccaggcactctgccaggctctgtcacataaaatagctcatttaatcttcacaacatattataagtggtattattaacgttacaaggtgagcaaagagattcttcaaggttagaagacttgcccaaaatcacacagtaatggttcaggcatttacctcaaggctactgttatgaaagccagtgttctttcctttcttt

SEQ ID NO: 4612 - DNA, 661 bp, Homo sapiens
  misc_feature [331]..[331]: Chromosome 13, SNP identification no. = rs12860849
  misc_feature [331]..[331]: allele = c, in linkage disequilibrium with rs9543827, respectively
  misc_feature [331]..[331]: n is a, t, c or g
gatgtctgcagctgctaaatgattgccccttgtaagctacgacactcctgatgacttctactcatctagtgggtttacacttacttgtgtttgttcccaaacttaattatgcaggtcttatacataattgtaattatgttattgaattaaatagtatgtaaacaaataatatgagcatgtaaggaaaataattgttactatgactaagttgaatgctctgagggaattagtaaaagtgagtctctaaaattgctctttatttagatgtggcaacacaagtgtaaaatagtgtttaaaatctgaaaacattatgcactcagccttgcattcnatatttaggttctcaatccatttaaagaaactcaagaatctcaaggtttgagaggttgtgcagtactcaatgggcatacacactccaattaatacaactgtagaatatatttaataattgaacaattgtattaataacaaaaaaaattctctttccatttatgtgtatgatttttttctgaagaagctactcagttgttagaacatatatctttattaagtttgggagccaaactacctgatcaacagtgctgttagctatttcttttggcttaggagcactgtgaaaaaaagtactaggggacaacaagcattctgtgaactgagaaag

SEQ ID NO: 4613 - DNA, 661 bp, Homo sapiens
  misc_feature [331]..[331]: Chromosome 13, SNP identification no. = rs876267
  misc_feature [331]..[331]: allele = g, in linkage disequilibrium with rs9543827, respectively
  misc_feature [331]..[331]: n is a, t, c or g
gggtttacacttacttgtgtttgttcccaaacttaattatgcaggtcttatacataattgtaattatgttattgaattaaatagtatgtaaacaaataatatgagcatgtaaggaaaataattgttactatgactaagttgaatgctctgagggaattagtaaaagtgagtctctaaaattgctctttatttagatgtggcaacacaagtgtaaaatagtgtttaaaatctgaaaacattatgcactcagccttgcattccatatttaggttctcaatccatttaaagaaactcaagaatctcaaggtttgagaggttgtgcagtactcantgggcatacacactccaattaatacaactgtagaatatatttaataattgaacaattgtattaataacaaaaaaaattctctttccatttatgtgtatgatttttttctgaagaagctactcagttgttagaacatatatctttattaagtttgggagccaaactacctgatcaacagtgctgttagctatttcttttggcttaggagcactgtgaaaaaaagtactaggggacaacaagcattctgtgaactgagaaagtttgggaacttctccactgcaggatggcagaggtacaagacagaaggaacccatctaacacctgtattgg

SEQ ID NO: 4614 - DNA, 661 bp, Homo sapiens
  misc_feature [331]..[331]: Chromosome 13, SNP identification no. = rs12866892
  misc_feature [331]..[331]: allele = c, in linkage disequilibrium with rs9543827, respectively
  misc_feature [331]..[331]: n is a, t, c or g
aatagtatgtaaacaaataatatgagcatgtaaggaaaataattgttactatgactaagttgaatgctctgagggaattagtaaaagtgagtctctaaaattgctctttatttagatgtggcaacacaagtgtaaaatagtgtttaaaatctgaaaacattatgcactcagccttgcattccatatttaggttctcaatccatttaaagaaactcaagaatctcaaggtttgagaggttgtgcagtactcaatgggcatacacactccaattaatacaactgtagaatatatttaataattgaacaattgtattaataacaaaaaaaattntctttccatttatgtgtatgatttttttctgaagaagctactcagttgttagaacatatatctttattaagtttgggagccaaactacctgatcaacagtgctgttagctatttcttttggcttaggagcactgtgaaaaaaagtactaggggacaacaagcattctgtgaactgagaaagtttgggaacttctccactgcaggatggcagaggtacaagacagaaggaacccatctaacacctgtattggttgttctggaaattttttgttatagcagctaatgttaccttagcatctaatgttgcctagagcagctaatgttacctgt

SEQ ID NO: 4615 - DNA, 661 bp, Homo sapiens
  misc_feature [331]..[331]: Chromosome 13, SNP identification no. = rs12868178
  misc_feature [331]..[331]: allele = t, in linkage disequilibrium with rs9543827, respectively
  misc_feature [331]..[331]: n is a, t, c or g
gtctctaaaattgctctttatttagatgtggcaacacaagtgtaaaatagtgtttaaaatctgaaaacattatgcactcagccttgcattccatatttaggttctcaatccatttaaagaaactcaagaatctcaaggtttgagaggttgtgcagtactcaatgggcatacacactccaattaatacaactgtagaatatatttaataattgaacaattgtattaataacaaaaaaaattctctttccatttatgtgtatgatttttttctgaagaagctactcagttgttagaacatatatctttattaagtttgggagccaaactaccngatcaacagtgctgttagctatttcttttggcttaggagcactgtgaaaaaaagtactaggggacaacaagcattctgtgaactgagaaagtttgggaacttctccactgcaggatggcagaggtacaagacagaaggaacccatctaacacctgtattggttgttctggaaattttttgttatagcagctaatgttaccttagcatctaatgttgcctagagcagctaatgttacctgtagcagctaatgtcactaatacaatgatttaaattaatacaataaattgaatttctattcgaaggcaatccttaggatggagctgtgatta

SEQ ID NO: 4616 - DNA, 661 bp, Homo sapiens
  misc_feature [331]..[331]: Chromosome 13, SNP identification no. = rs9543825
  misc_feature [331]..[331]: allele = c, in linkage disequilibrium with rs9543827, respectively
  misc_feature [331]..[331]: n is a, t, c or g
gtacaactactgtatttcttaagtttctgtccaaccaaaactaggtatagaatggaaagccacccctagtactctacatttatgtgatccaggaaactaagtatacatttcgagagattttgtactaacatcattggaatttaaatcagggataaaccaaagcaacaaagaaaattcacaatgttttcaaatactgtattacaaattgtaaaacaatatggtttttgttactttgccataaatcccattccttactggccattcttcactattaccctggagaagggaacagtcagaaaagtagatgccgcatctggagaaaagaagacanaatgtggaaaaactcttgaagaaagtcagctgaagaagaaagtccatacttctgacccccagagaagcatagaggggaggagaaaagtcagaaggaggcacaggtgaaaagatgtgtgtgttttgactttccctctgggctaaggactgagtgaaaggagagagcatatgggataggctaagggacaaaacagaaataggaggagcttttgctctactttacagggctctgaaaggagactgcattatggattgacatcaaccagggtggctgtagcagaggaccataggtgaagtggcaagggtgggcaagggaggatcttagagcctt

SEQ ID NO: 4617 - DNA, 661 bp, Homo sapiens
  misc_feature [331]..[331]: Chromosome 13, SNP identification no. = rs9543827
  misc_feature [331]..[331]: allele = c, t
  misc_feature [331]..[331]: n is a, t, c or g
ttctctgatgcttcttcaaactagggcttcttagaccactcagtgacagaccctgactcagagtgcctggaatggggtccaggtatttttaacaagtaccccaagtgacccatcaccagagaaatttagaaaaaccttgttctatcatctaatccataaattgcaatctgtccttacaatcatctacatttcagtaagatggtgccaccgttgatcctgatgcataagccaaagtcttagaaatgctgcattctccctcgctcctatatacaatgcactacccacacctttgatcctgtcatcaatttatatctcaaataatcaatttctngccttctactctgttaacaccatcatcttctagccaaaatttcgacaactcttgacaatgtgtatgcttctactcttctgctttttcactatattccatatttagtagccagagtcatcttcttaaaacataaatcaaattttgtcaagctcatgttacagttctgattaaatcttttaagggattatacttcaggtagaactcaaacttctttctcgtggttcacagatcctgcatgttctggccttgactgcctcaccagcttccctcaagccctttttcctccccactcatcatcccatccacactggttttctttgagggttccca

SEQ ID NO: 4618 - DNA, 661 bp, Homo sapiens
  misc_feature [331]..[331]: Chromosome 13, SNP identification no. = rs12865179
  misc_feature [331]..[331]: allele = c, in linkage disequilibrium with rs9543827, respectively
  misc_feature [331]..[331]: n is a, t, c or g
caacaggctcttgcttgactcatggctttttgtacaaactcctttttcccctacatatggcattgtttggatgactagttgctgctcatcctttggctctcaccttcaatttcacttcctgggggaagactgccctgccaccctataaaaagtagactgttatctatcaccctataaatagtagaattgtcttctcaatctcaggctattgttcttattcttcataacacttatcacaatttataaatatttatgtttgttttgtcttatgtgcattcatttattcactttttgctttccaaataaaatgagaactccatgaatataaagnctgcatcatttgtgcacaatatagcacatggctctccgtaaatatctgttgaattaatgaataaataaataaaacatggaatcattagacctttgagctgtctttatgtttgtgagaaatggaatcccttttcaaacttctccctggaaaacacaatttgtagaattttctcacagacatgatagaaaaaaaaaagtataaatataccaattctccaaagtgaataaaatcagaataaaggggaggtgggcagaacaaaaggaatctaggtaactttctagaaaaagcaatattctggctccttaaaaacttgcaagataatccacattc

SEQ ID NO: 4619 - DNA, 661 bp, Homo sapiens
  misc_feature [331]..[331]: Chromosome 13, SNP identification no. = rs947066
  misc_feature [331]..[331]: allele = a, in linkage disequilibrium with rs9543827, respectively
  misc_feature [331]..[331]: n is a, t, c or g
gatgagttactgatcttcacaatccaatgaaatgacttcatctactgaaattttattcacctggactgacaaaggagttgggctttcactaactgaagagtggtctttaaatgacactagtatctaacggcactagtggtatccactgaaaattgacattcaaaagaggatcatttcaatagcgtttacaatttacaaatttgaggatatgattcatttcataaaatgtacacttgagaaaaataaaacctcattaaggagtaaatgctggtcaattagccttactcgctacttagatttttccacatacttagagtcaaagacctgccanttaggaaaagtggaaaatagtcattttcatatatttatagatgccaaagtaaaatatttaaatacatttggtgactttgttgataacaggtatcaaaaatgatatatttttacttactcttcacaccaacaattccaaagatgtcaaagtggacttctaagaaaagatttcactatgtgaatgtttactcccacttaaaatagtgaaaaatcagtaacctctttactaagcaaaaaacaggaatttagctaaataaatcacaatacatccatgggatggaaaactatgaagtcatcaaaaagatgtggtggaatatgcaatgatacagaa

SEQ ID NO: 4620 - DNA, 661 bp, Homo sapiens
  misc_feature [331]..[331]: Chromosome 13, SNP identification no. = rs947067
  misc_feature [331]..[331]: allele = c, in linkage disequilibrium with rs9543827, respectively
  misc_feature [331]..[331]: n is a, t, c or g
ggactgacaaaggagttgggctttcactaactgaagagtggtctttaaatgacactagtatctaacggcactagtggtatccactgaaaattgacattcaaaagaggatcatttcaatagcgtttacaatttacaaatttgaggatatgattcatttcataaaatgtacacttgagaaaaataaaacctcattaaggagtaaatgctggtcaattagccttactcgctacttagatttttccacatacttagagtcaaagacctgccagttaggaaaagtggaaaatagtcattttcatatatttatagatgccaaagtaaaatatttaantacatttggtgactttgttgataacaggtatcaaaaatgatatatttttacttactcttcacaccaacaattccaaagatgtcaaagtggacttctaagaaaagatttcactatgtgaatgtttactcccacttaaaatagtgaaaaatcagtaacctctttactaagcaaaaaacaggaatttagctaaataaatcacaatacatccatgggatggaaaactatgaagtcatcaaaaagatgtggtggaatatgcaatgatacagaaagatcttaacatagttattcaggaagtatgttatgttctagacactgtgtttagtatgttct

SEQ ID NO: 4621 - DNA, 661 bp, Homo sapiens
  misc_feature [331]..[331]: Chromosome 13, SNP identification no. = rs12862025
  misc_feature [331]..[331]: allele = a, in linkage disequilibrium with rs9543827, respectively
  misc_feature [331]..[331]: n is a, t, c or g
cacccagtatgactcccactctgctcggggatggaggattagaaaatacaaaacagaatattctgagatttcttccagtgatgaacatatattgctcttgaaataagaaaacaattgtttttaaaaactaagataatcttccaaaaaaaaaaaaaaaaaaactagagtcccatctatgcaagctcttttccaagcagaaaattaactatgaatcaaaaatagcaaaaacaataataatagctgtcagtttaatagaacactaactatatgtcacgcatgtttgttgtgctcaattcctgacctagattatctcaactgaccttcactatangtgtgagttagagaccataattatacccatgttacagatggaaaaacagaatttgagaggtaaagtacccaagtcttcttattccagaatccctgtctctttcatatagaccctcagctgtcttggcagagccaacatgttgaggataaagtattcaacttgacaaattccccagtaccagatccagaggagcacaatgaaccccatgttcttcttatccatctgtaaggataaggattctaatgtaaagtcctgtccaggaccatcttatgacccacaatcagtagcacctccggaaaaaggaattcagtatttattacctagctgaat

SEQ ID NO: 4622 - DNA, 661 bp, Homo sapiens
  misc_feature [331]..[331]: Chromosome 13, SNP identification no. = rs17337503
  misc_feature [331]..[331]: allele = a, in linkage disequilibrium with rs9543827, respectively
  misc_feature [331]..[331]: n is a, t, c or g
ctgtttctgtgatttttgaggttgtttatatgacatgctgcacaatcactctgtaggtaaaatctcaacaaagctgtctgaatgtcatctctaaaaaagaccaaagttggcagctgtaatgacacaagggacagcattctagagacaagcaggcaagaagtactggaagcaaaagagcagagacaaccagggagcagaatccatccaggtggaagcctgggtcccagcaagtcagagaaccttgaaaagggattagacaggaaggttgaactaaaaagtttgccaagcaggctgtggttccccagtcgtagagctgctgttcagggtaagntctgcagtccctgggagtcgggaaaaactggaaggcgaagtgggaagttggccccaagtacaggcaggaacccagatcctcattttggagtacaaaatcaagccaaaattgtccataatctccatttgatcttagtcacttaaactaatgagctaattggggctcctcaaattcttctaactatgagattagtcccagaaggtagtgtaggctggatttttgatgtgcatgtttactttgggttcaggtatcttatttatgtctacttgcttttcagttgattctcatggctctttcagttagcatatggcatcttttgcaaatgataat

SEQ ID NO: 4623 - DNA, 661 bp, Homo sapiens
  misc_feature [331]..[331]: Chromosome 13, SNP identification no. = rs9543830
  misc_feature [331]..[331]: allele = a, in linkage disequilibrium with rs9543827, respectively
  misc_feature [331]..[331]: n is a, t, c or g
aattctcaacaaaatactagcgaacagaattaaacaatacatttaaaggatcattcaccacaatcaagtgggatttacccctaggacacaaggatggttcaatatttgtaaatcaataaacatgatattctatattaacacaatgaaggacaaaaattatatgattatactattagatgcagaaaaagtatttgacaaaatattaaaagtaaatgacaaaaacaacaattacttttgcaccaacctaatataatatactttcatgattaaaaactctctcaacaaattagttataaaataaatgtacctcaaacaataaaggctatatacnacaaatccatagccaacatcatactcaacagggaaaagttgaaagcttttcctctaagatctggaacaagacaacaatgctcactctcaccactcctattcaagactgtgctacaggtcctagccagagcaataggcaggagacagaaacaagagtcattccaacagaaaaggtataagttaaatgtccttgtttactgaggacatgagcttatatatagaaaaccctaaagattccaccaaaagactgttagaactgataaatttagtaaagttgcaggatacaaaatcaacacacaaaaatcaatcagtgtttttctaaaataccaat

SEQ ID NO: 4624 - DNA, 661 bp, Homo sapiens
  misc_feature [331]..[331]: Chromosome 13, SNP identification no. = rs9573460
  misc_feature [331]..[331]: allele = c, in linkage disequilibrium with rs9543827, respectively
  misc_feature [331]..[331]: n is a, t, c or g
aaaacccaaatgtgatttccacagacagattttaaatgcagaaaaaaagaaagcttgaaacctctcatttagggccactgtctggctttcattaagccttctctcatttttttcatagccagggttcatggaccagtgcctatctacctggttggctgagattaaaatgagtaatagatcctccttgccatcaggatggctcctaatgcatttttcattaaattgaactcccacttgggtcctctttctgaggttcagacagaggtaagagaggtatgtgcttgcttgtttactagcatttaaacagggttgctctcttctcataaaccanaacaattttgtacttaagatgatttctgggaaggtagaaacattgtgtttatttgaccatctgttaagagagtactggttcattacaatatacttccaactgattatttcagaactgtaataaaatattttaggcaaaggtcagacagataacctactttccataaaaaatatacatatacgtacatacccatcactcattcacatacatatatacacgcatatacttacacatatgcatatttatataccaacacacacccataatgcagaaacacatgcatgtatatacatgtacatatacacatccatagcccacacacacatgcat

SEQ ID NO: 4625 - DNA, 661 bp, Homo sapiens
  misc_feature [331]..[331]: Chromosome 13, SNP identification no. = rs17252720
  misc_feature [331]..[331]: allele = g, in linkage disequilibrium with rs9543827, respectively
  misc_feature [331]..[331]: n is a, t, c or g
atttcacacatacacacagaaaagacaaggccatgtgaagacagaggcagagacaggagtgatgtggccacaactcaaggactgcccacagtccccggaagctggaagagcaaggattagattctcccctggagcctctacatggagtgctgccctgccaacaccttgactgcaacccagtgacactgatctcagggttcggcctccagcgttgtgagagaataaatttctgttgctttaagccaccaactttgtggtaatttgttatagcaaacttatacatctatcagtttatacacacttatacaacatctatcagtatatacacacngaaaacttatacaacatctatcagtatatacacacaggttcatacactcacagatttacacactcatccaaccatgcacacacacccagagccatcactcatttacacaatcatgaacatgcagtcacacttacacaaggatccatttatgcactagcagttaagttggttatcaccaaagtatctttaaggaaacaaaaatctcgaatcacacccttctcaaataaatatataagaaaataagatgtcaacatattaataacaattggaagagaagacaataagtgaattttctccatatttagttttatacataaataattataacta

SEQ ID NO: 4626 - DNA, 661 bp, Homo sapiens
  misc_feature [331]..[331]: Chromosome 13, SNP identification no. = rs16969008
  misc_feature [331]..[331]: allele = c, in linkage disequilibrium with rs17548667, respectively
  misc_feature [331]..[331]: n is a, t, c or g
aatgagcctcttcatgtgtagggtctggtacaaacaaacagcaaacagcacttcacctgcatgaggtccagcgaagataaaggcagatggactgggagcatggcttcatgaccaggaactgctctggggaagccatttcccagctagaaaggtgagaggtgattgtgacaagtaagggagctgatggtgtaaggtgtagttttgagcaaactctgtccgctgcactctacctcaccatcacctcttcatctgtcagcaagtacagcaatgggctgggatgttgtggttctagcagttctacaggtaaaggctcaacggggaatttgtattnggctctgggctctgatgaagatgaggcaggatggttgggctgatagcctgagcaaccccactgactagctgtgtggaggaaatacctctaaattgatgtgcccgattccacaagtgtatgggatttttagacactgattttctgtttgttctgatttcacaaagtcagaaggtggtacctcataacaaaaagggagatggaagccaataggttctgttgacaaattacatttgattgacatacaaaaaattgcctgaattttagtctcatgtgtttatgaaacaatgaagggaactaaatttggaaaatgtcaccctcccaccctcccaa

SEQ ID NO: 4627 - DNA, 661 bp, Homo sapiens
  misc_feature [331]..[331]: Chromosome 13, SNP identification no. = rs17548667
  misc_feature [331]..[331]: allele = c, t
  misc_feature [331]..[331]: n is a, t, c or g
ggctttttcatttgacatttatacaattagccatggctttggctggggtgttaaaaaaggcaagtaggaaatcaccagaaacaggagaacttacagatatgttgccttttttggtgtatgtggaacatagtacgagaaactctcatgggaactctgaggaaggaaacataccatgtctgtcactaaccagggaaaaaaaatgtcactgggccagtaagcattaagcagaacaataagaacttcctggtgccaagagtcaggacaaatgtgtgaaagggaatgaagggacattaccatactgagcctttcacaggaaaatgctaaataaacngagagatgcttgtcaatatttggataaggaaacatgtctcagtctgatttttaaggcacgctacaaaaaaaaaaatcttgagaaactttgtactgtattcacaatatcaacaaaaataatacacttggagtctggggtggccattctcatggtaatgaatgtgtttcaacagtgatctcctattgtgagccttggagctgcatgtctccaggctctagggaggcacggatggacaccgcccccacattgtggccacagcgtgcctttgtgagcctcagctgtgagcttctcaagtcctcaatgggcaggcagggcacactgaattaggac

SEQ ID NO: 4628 - DNA, 661 bp, Homo sapiens
  misc_feature [331]..[331]: Chromosome 13, SNP identification no. = rs12429618
  misc_feature [331]..[331]: allele = c, in linkage disequilibrium with rs17548667, respectively
  misc_feature [331]..[331]: n is a, t, c or g
accaaagtgccaggctttcaccctgctgtcatcgcaccatcccactgctgcagcactctctatcccacagctgggcagcactatgagcctcactgcatccaaacctgtctccagtccactgcccatacttcacaggagagactggtgtgccctcctttttcttaattcattgatgtatgaagagcaacaacctgtaaagggaatggtggctttgctcctctcacaccagtgactacgatgtgtgactgtggcctcatgtctgctgcctaccaagacctttctacattgcctcgttggtacttttcagcttcttgggcacaggatcaagttnggggggcagggcagagccagacacagccaggagatttagcaaatctctgtgtcttcatggtccactgtacaaatgagtccagggtctaaaaaagtaatcagctcacagatgtgtccattgaaatggaagagaccaccagtggcagcctactaacaactacctctaggctctttatgccgatggctatgaactttctctcactgggacatttgttaacatggaaagaagtccaaaatacatactggctcagtctaactccctctgtgctccctacgctccagcttcctgttgaagagaggagaattttgttcccactgtgcaagtcatttt

SEQ ID NO: 4629 - DNA, 661 bp, Homo sapiens
  misc_feature [331]..[331]: Chromosome 13, SNP identification no. = rs11069790
  misc_feature [331]..[331]: allele = a, g
  misc_feature [331]..[331]: n is a, t, c or g
ctttattccctttgctttccaggcttcaaccatatatctggccctcacgtccaaaagctcgagttgatatgttttgttgctgtttgtttcttattgtccacagaacttgaggcatgggccacagtactggggataaggaaggtgtagggagtaacagccagagtagttccttctctccttttcccaatggcaaggctgagaaaccatttatcaagcatttttattgactgggacagcttgaaagcactgtcattacctgggcccatttctcttccattttcctggtaatttctgtagtcactgaggaagcccacattctggttggtccacngatttccttattgcaatcatttatttgcctgcactataggcttaattctccttcctcttttgtaccaagagaggtgctaaaaatcctatcaatatcacaattgactcctaagctgaagaagaaagttattttcttatgtgacgtgtaaagtgatcctcaatataatccctgaagttgaacttcagaaatgtttcgtgctgcagcaaaattggggggaaacattggcaaaatcttccaagaacacataggtcttgggatggccacatgcatttggctatctacattcctgcacatctgtggagagaaaaaaagtttcttttttaaaatacg

SEQ ID NO: 4630 - DNA, 661 bp, Homo sapiens
  misc_feature [331]..[331]: Chromosome 13, SNP identification no. = rs7320738
  misc_feature [331]..[331]: allele = g, in linkage disequilibrium with rs7319633, respectively
  misc_feature [331]..[331]: n is a, t, c or g
tgagttgccatcttgaagcttaccttctaaaaatactaacagcaggacaacaatgcaaatctgtgtgctttctatccaagggcactgttctctctgctttacttactttattaaattttcacaactaaatgactttctaccaatgagcaaattgagaatcacagagttttaaaaacatacctattgttatctactttgcatgtggtagatccaagttgctaatgtatatctgaacacagagccggtcactatgaacatgctacccaccaacatgtgctctctctctcttcgggctccaagctttccataacgcttccaggttgccaaaccntcaatcccagccactttgaagacccctcctaatgcttccctgccattcacaactacaccttgtggtgactgaacagctgttctgtttcgcttcaggctgttttcctgggaaccaccagccattcctcgtgcccactgggtcttactctcactggccccatggaccccctgaggttgtcagtgacttctgttgggttccaggtacaggcaccctttgccacagagatgacctctggaatgttctcagcctccttccatgccctccatgtacctgtgggaatgtcttgatgctttccatgccacagtgacaaggacagcaagctcagatcct

SEQ ID NO: 4631 - DNA, 661 bp, Homo sapiens
  misc_feature [331]..[331]: Chromosome 13, SNP identification no. = rs6492221
  misc_feature [331]..[331]: allele = g, in linkage disequilibrium with rs7319633, respectively
  misc_feature [331]..[331]: n is a, t, c or g
atagaacatctgctcaggacgaggacacgtgggatcacatcctcagagccccgtcgtcttcagagcccttctctaggctggaggcagtgaggacaggatgggagtgtctcctcccttccctgtttcccagggagcatggccagcttggtgactgtcacagcaggtgagcagcaaactcccaggccagcagggaggggcgactgtgagcagaatgacagccacatggtaggtgtgtactttagagcaggggcctctcctcgaggttaccccagctcatgccccagcagatagcttggtgggagtgctgtgcctgaccctcccataacctacngagcccaggtggggagagtcactctccagatcttacataaaagatgtagcacctcacacactgctgttacagagcagataataaatattcatgatatgcaattgaatagttatttaaaatgtttatctatggatgaatgaatgaactgaacaaagagcaaaatatacagacaagtaaggtgtcacaaagctggctctgagtaaccagcctgttatcaaattcatttgtacagtaataaaagaaaacatatcccaccagccatgtgccaggcactgacatgggagcttcacacatatgaaggcgcagagcaatcggcacaatcctctgctt

SEQ ID NO: 4632 - DNA, 661 bp, Homo sapiens
  misc_feature [331]..[331]: Chromosome 13, SNP identification no. = rs7336999
  misc_feature [331]..[331]: allele = c, in linkage disequilibrium with rs7319633, respectively
  misc_feature [331]..[331]: n is a, t, c or g
tagtaaaatcattttaaattttcttctaaagaactatcaagattgtaaggacattcaaaaacaaattttatgtacatagtactaataacatccacgtatttccaaacatctaaatacttgaaattgtatgtaatcagcaagtatcatagtatacctttatcatgactgataaaacctttggaagctgagtaagtaattttcaaaaattattagttcctgaaagaccctgaaatctgtttcataaattggaaatgaaatctagctattaattcaagatcctctagataaatcataccctgggcaccttgaaagaatcaaagattttcagtanttttttccacatactcaaggtataatattataagacaagaaaggagatagactgaggcttccatttatctactactcattaatcatttattgagcatctacactgggtcagatattatgttaggtattgtggatacaaagatgaatgaagcaaacttcctgtccacaactcattgtaactagagagaataattttagcaggggagaagtagaattgtaagttgggaaggcagatttgaacaacagtgtggtaaatctcaaatattagactaaaggttttatcctgtaattattggagaatagggaattatttggaaaataaaattaacat

SEQ ID NO: 4633 - DNA, 661 bp, Homo sapiens
  misc_feature [331]..[331]: Chromosome 13, SNP identification no. = rs2026815
  misc_feature [331]..[331]: allele = g, in linkage disequilibrium with rs7319633, respectively
  misc_feature [331]..[331]: n is a, t, c or g
gccctcaggcattttgcctaaatcccatttctttttctctgccggctgtctgctaatccctcggaaagtgttagctgataacttaaggtgtgaccactctcaggagtattgcatttcaaaagaggcctccaagatagaaaatacttcacttaaaggagctagacaaggaaggaaggttgttattttttaacctgcttgtaagttgagttccaggccatttaactcagtctttagcgagatcctctgtgagcttccccactgcatgaatttccctccaattctgagagccagtgactctggacggcacttcctcacttgaaagcatcacatnacaatcatttcggcctaaaacttattactcatctgtgttagctagagattgtagctgcgtaaatgtggcttatttcatccagaacagaaacattaaaacgattcgactcctgcaggacatcttaatagtgtgtgaaaggaagaattcatatttccagaactctgtacctgttacagctcaggcggtctatgctttcataaacatagtgacatattttatgcattgatcttaaaaccctattacaaattctattccatattttcttagacatttggacacacttaaagctgaagcaaccatgtgtcagggttcgctcattaaggttttctg

SEQ ID NO: 4634 - DNA, 661 bp, Homo sapiens
  misc_feature [331]..[331]: Chromosome 13, SNP identification no. = rs2391785
  misc_feature [331]..[331]: allele = g, in linkage disequilibrium with rs7319633, respectively
  misc_feature [331]..[331]: n is a, t, c or g
aaaagtgtgacatttgaccacaactagatgattcttttctgttccaaagctgtatgattccctggtcatagtcaagcccatcgatggggaaaactagaatagaacttattggatgggtaccatgcatgccatcatttaacgtcgccttgtcctctgggggccgttatcccacaggactccatggcttcctgcctctctaccatctcctctctctgtggaagcaagggtcggctcacagtttggaatctcaattgttgagaaagtgtaattgtttacaaggacagaccaatgagtaaaaccagccatattttcacacacacaaaaaggggcnatagatctcaacttctcattatggataaaaatttcaaaatatcaagtcaggtgaaggacatgtgcagcgaggactggtgtgacctcaggactcagcatttattttacctcattagtgtaagaatgtcacaagattgacaggaacagcaattcaatcaatcggcttcaatcaaggctaccaaaaatgagagccaatctcttgccattagattttgggcttcaaacaattttaggaagaagttctattcgctagctgtataaacactagaaatttattgcctgaaatctttgtatgaaagattattccctgaagtctttgtctgaaagtttt

SEQ ID NO: 4635 - DNA, 661 bp, Homo sapiens
  misc_feature [331]..[331]: Chromosome 13, SNP identification no. = rs7985034
  misc_feature [331]..[331]: allele = t, in linkage disequilibrium with rs7319633, respectively
  misc_feature [331]..[331]: n is a, t, c or g
gggaccaggaagaaagctgcagagaggcaggctcgtgctcacctgcagtcatgcccatcttgcccacctgctgtctgcgactaggccaactcctaaacctctctgaagcttaagacctgccacagtgggctgtgccagagttggagtggagactcactgagatcatctagaagaggcacctgcctcaaagccttcaggtaatacccacacataaaccttagggtttttcctacctgcaattctgtgttctggccccttcacgatgacccagccagcctaggcatcaagccacggaaagtcctagaggaagtgggacctggctgaagtgggnataagcatgtagagaccaaagctggcagaagatgaccccggctatccatccccatattttgggaacttcctggaggaagccatcctacgaggtgccccagaggaaaggaacctatttttaatgaggttacattgtaactaaattgatagcagggagggagaaacagaagcttctgagggagtataggtgtggtggatatttgataatactctgaaatatttttggtcttattttatttgcttttactacaagaaaagaaaatctgctttatttagaaagccatttagaagtccttactggctaataaatacataataagtaaatatttat

SEQ ID NO: 4636 - DNA, 661 bp, Homo sapiens
  misc_feature [331]..[331]: Chromosome 13, SNP identification no. = rs9587970
  misc_feature [331]..[331]: allele = c, in linkage disequilibrium with rs7319633, respectively
  misc_feature [331]..[331]: n is a, t, c or g
ctctctgaagcttaagacctgccacagtgggctgtgccagagttggagtggagactcactgagatcatctagaagaggcacctgcctcaaagccttcaggtaatacccacacataaaccttagggtttttcctacctgcaattctgtgttctggccccttcacgatgacccagccagcctaggcatcaagccacggaaagtcctagaggaagtgggacctggctgaagtgggtataagcatgtagagaccaaagctggcagaagatgaccccggctatccatccccatattttgggaacttcctggaggaagccatcctacgaggtgcccnagaggaaaggaacctatttttaatgaggttacattgtaactaaattgatagcagggagggagaaacagaagcttctgagggagtataggtgtggtggatatttgataatactctgaaatatttttggtcttattttatttgcttttactacaagaaaagaaaatctgctttatttagaaagccatttagaagtccttactggctaataaatacataataagtaaatatttattatacttattataatatatataatactatataatatataaatactatataatatagtaatatatattaagtaatattgtgacttcttaggaaagtcac

SEQ ID NO: 4637 - DNA, 661 bp, Homo sapiens
  misc_feature [331]..[331]: Chromosome 13, SNP identification no. = rs9301408
  misc_feature [331]..[331]: allele = t, in linkage disequilibrium with rs7319633, respectively
  misc_feature [331]..[331]: n is a, t, c or g
ccactcccagagaaaacaggaggatcgacctttctctatgcaacgtctaaaattaatttggtgcttaaaatcagaggtgggtcaagcagttgattacctgaggttgcctttggactaacaaaggcgtctcttcagcatggtgaattgctctgatggccctgggcccggagcagtgatttgagaaaatcacccatggcaaccattaggcaatgagtctccattgactgccaaaatctcactgaatattgaaggaaaagagaatttatatgtaatccaattcagagcaacaacaacaacaacatcaacaattcaatgttccccagttcttcangggaaaacttcaatccaggtccaaagagagctgcaagaacagcgcagttcacacagaaagtctgcattcacaggctgggctggggtcgcaactctgcgggcctccccaccctgccacgctttgtactgctgtgtgattttagcggaggcatttagctcacacagccttagtttcctcatctgtaaaattgaatagctaccttctaggctttgggagaatgcaatggaaaaagaatcttgcctagggcatcatcagctcagtaaataatagttattatcatgatgattatcctccaggtagctgtgatgtgtagaagcccagaaccaagta

SEQ ID NO: 4638 - DNA, 661 bp, Homo sapiens
  misc_feature [331]..[331]: Chromosome 13, SNP identification no. = rs7319633
  misc_feature [331]..[331]: allele = g, t
  misc_feature [331]..[331]: n is a, t, c or g
gccctgggcccggagcagtgatttgagaaaatcacccatggcaaccattaggcaatgagtctccattgactgccaaaatctcactgaatattgaaggaaaagagaatttatatgtaatccaattcagagcaacaacaacaacaacatcaacaattcaatgttccccagttcttcatgggaaaacttcaatccaggtccaaagagagctgcaagaacagcgcagttcacacagaaagtctgcattcacaggctgggctggggtcgcaactctgcgggcctccccaccctgccacgctttgtactgctgtgtgattttagcggaggcatttanctcacacagccttagtttcctcatctgtaaaattgaatagctaccttctaggctttgggagaatgcaatggaaaaagaatcttgcctagggcatcatcagctcagtaaataatagttattatcatgatgattatcctccaggtagctgtgatgtgtagaagcccagaaccaagtagcacaggagacagaggtagttaattcaaccctcctccaatacaactgagtgccctaattatccgaatagaagctccactgcaggaaaactctgttttggagctcaaggaaagacctacaagggagaaccacagagctgtaattatcagctgaaag

SEQ ID NO: 4639 - DNA, 661 bp, Homo sapiens
  NPAS3
  misc_feature [331]..[331]: Chromosome 14, SNP identification no. = rs243313
  misc_feature [331]..[331]: allele = t, in linkage disequilibrium with rs7152037, respectively
  misc_feature [331]..[331]: n is a, t, c or g
ctaattatctttacaattggccgctacccgctgtttccatagaccctgcctcagttcagacccatccccttctcatatgcattattcttctcacttcataactagcctccttttagtcttgacttaaagcattacctaagctgatccaagcacaagctttataaaactcagagtcatctcagttgcataaatgatatagctaaacacccatactctgagggaaggttctcccagctggccaggaaatgagtttagagtttaggcaggctctggaatttaggcctcctgcttttcacacctaagcttcttccttggaccacagtgcctcccngtaaggaaatagatgccaggactctagcaacttttttaaagggctacatttttatataagaaaagttcaaggatcttttatcatttcattagttggagaagctaaaacaatgcacagaatttaagtcatagatgcacgatagtggcagtgcctatgcaagttctcaaatctgaatcatgagtttgctgcttttctcttgaccctttcttgcttctctgaatttacaaatgtgcatgtgagaaaacatgcttctctttaaagatccaagggtaagagagaaaataagaatccagataataaagtatagctacaaaagggagcccacttagt

SEQ ID NO: 4640 - DNA, 661 bp, Homo sapiens
  NPAS3
  misc_feature [331]..[331]: Chromosome 14, SNP identification no. = rs1875288
  misc_feature [331]..[331]: allele = a, in linkage disequilibrium with rs7152037, respectively
  misc_feature [331]..[331]: n is a, t, c or g
ggatcttttatcatttcattagttggagaagctaaaacaatgcacagaatttaagtcatagatgcacgatagtggcagtgcctatgcaagttctcaaatctgaatcatgagtttgctgcttttctcttgaccctttcttgcttctctgaatttacaaatgtgcatgtgagaaaacatgcttctctttaaagatccaagggtaagagagaaaataagaatccagataataaagtatagctacaaaagggagcccacttagtttggaaaaaccattactgtatcagaatgatgtatctgcaagtgacttgcatgaacatattttatgtgcccnccagcatgttttttgtggttccctgcagcagatactgctcttttattactcgttagccacttaaaatccagcccaattttaacagtgctaaaagagcaagaaaatttattttaaagaaaaaggctacattcttctaaactggagtcataatattaatacttaaaatgcatggcaacatgctgggaaaatgggatagttatttagatatattataaaatgtagcccaccactttgatgtgattcactactatttcaccaaaccaatttaacagtaccctgtagagagggaatagtgcaattaaaattagtgacagagattttcacatgcat

SEQ ID NO: 4641 - DNA, 661 bp, Homo sapiens
  NPAS3
  misc_feature [331]..[331]: Chromosome 14, SNP identification no. = rs8014015
  misc_feature [331]..[331]: allele = c, in linkage disequilibrium with rs7152037, respectively
  misc_feature [331]..[331]: n is a, t, c or g
aacaatgcacagaatttaagtcatagatgcacgatagtggcagtgcctatgcaagttctcaaatctgaatcatgagtttgctgcttttctcttgaccctttcttgcttctctgaatttacaaatgtgcatgtgagaaaacatgcttctctttaaagatccaagggtaagagagaaaataagaatccagataataaagtatagctacaaaagggagcccacttagtttggaaaaaccattactgtatcagaatgatgtatctgcaagtgacttgcatgaacatattttatgtgcccaccagcatgttttttgtggttccctgcagcagatantgctcttttattactcgttagccacttaaaatccagcccaattttaacagtgctaaaagagcaagaaaatttattttaaagaaaaaggctacattcttctaaactggagtcataatattaatacttaaaatgcatggcaacatgctgggaaaatgggatagttatttagatatattataaaatgtagcccaccactttgatgtgattcactactatttcaccaaaccaatttaacagtaccctgtagagagggaatagtgcaattaaaattagtgacagagattttcacatgcatagatctaaatcagggtaggttgataatgaattaag

SEQ ID NO: 4642 - DNA, 661 bp, Homo sapiens
  NPAS3
  misc_feature [331]..[331]: Chromosome 14, SNP identification no. = rs6571591
  misc_feature [331]..[331]: allele = g, in linkage disequilibrium with rs7152037, respectively
  misc_feature [331]..[331]: n is a, t, c or g
catagatgcacgatagtggcagtgcctatgcaagttctcaaatctgaatcatgagtttgctgcttttctcttgaccctttcttgcttctctgaatttacaaatgtgcatgtgagaaaacatgcttctctttaaagatccaagggtaagagagaaaataagaatccagataataaagtatagctacaaaagggagcccacttagtttggaaaaaccattactgtatcagaatgatgtatctgcaagtgacttgcatgaacatattttatgtgcccaccagcatgttttttgtggttccctgcagcagatactgctcttttattactcgttanccacttaaaatccagcccaattttaacagtgctaaaagagcaagaaaatttattttaaagaaaaaggctacattcttctaaactggagtcataatattaatacttaaaatgcatggcaacatgctgggaaaatgggatagttatttagatatattataaaatgtagcccaccactttgatgtgattcactactatttcaccaaaccaatttaacagtaccctgtagagagggaatagtgcaattaaaattagtgacagagattttcacatgcatagatctaaatcagggtaggttgataatgaattaagtaattttgcttccttgtgaag

SEQ ID NO: 4643 - DNA, 661 bp, Homo sapiens
  NPAS3
  misc_feature [331]..[331]: Chromosome 14, SNP identification no. = rs7152037
  misc_feature [331]..[331]: allele = c, g
  misc_feature [331]..[331]: n is a, t, c or g
agcccacttagtttggaaaaaccattactgtatcagaatgatgtatctgcaagtgacttgcatgaacatattttatgtgcccaccagcatgttttttgtggttccctgcagcagatactgctcttttattactcgttagccacttaaaatccagcccaattttaacagtgctaaaagagcaagaaaatttattttaaagaaaaaggctacattcttctaaactggagtcataatattaatacttaaaatgcatggcaacatgctgggaaaatgggatagttatttagatatattataaaatgtagcccaccactttgatgtgattcactantatttcaccaaaccaatttaacagtaccctgtagagagggaatagtgcaattaaaattagtgacagagattttcacatgcatagatctaaatcagggtaggttgataatgaattaagtaattttgcttccttgtgaagtcacatccataatagattcatccaggatggaattcatgtttaaaggacctgtctactcacagtattctgactcaattgacaatattcctggttgttttccttcttttcttttttgctttttcagtttggctttgatgacagaatttaaagtggatagtcataataaattagtataatctgactatttgatct

SEQ ID NO: 4644 - DNA, 661 bp, Homo sapiens
  NPAS3
  misc_feature [331]..[331]: Chromosome 14, SNP identification no. = rs7152368
  misc_feature [331]..[331]: allele = g, in linkage disequilibrium with rs7152037, respectively
  misc_feature [331]..[331]: n is a, t, c or g
tgaacatattttatgtgcccaccagcatgttttttgtggttccctgcagcagatactgctcttttattactcgttagccacttaaaatccagcccaattttaacagtgctaaaagagcaagaaaatttattttaaagaaaaaggctacattcttctaaactggagtcataatattaatacttaaaatgcatggcaacatgctgggaaaatgggatagttatttagatatattataaaatgtagcccaccactttgatgtgattcactactatttcaccaaaccaatttaacagtaccctgtagagagggaatagtgcaattaaaattagtnacagagattttcacatgcatagatctaaatcagggtaggttgataatgaattaagtaattttgcttccttgtgaagtcacatccataatagattcatccaggatggaattcatgtttaaaggacctgtctactcacagtattctgactcaattgacaatattcctggttgttttccttcttttcttttttgctttttcagtttggctttgatgacagaatttaaagtggatagtcataataaattagtataatctgactatttgatctgtttcagcaaaggccaactcttttcaaaacataatttcacaaatctaatttttaagaaatca

SEQ ID NO: 4645 - DNA, 661 bp, Homo sapiens
  NPAS3
  misc_feature [331]..[331]: Chromosome 14, SNP identification no. = rs10129441
  misc_feature [331]..[331]: allele = a, in linkage disequilibrium with rs7152037, respectively
  misc_feature [331]..[331]: n is a, t, c or g
catataaaatttgttatcttctccagccctgccaaaacatggtgatgacaccctgccccttttaaaacctgaaagatggctttagtaatctatccttggcccttttaaaacctgaatgatggctttagtaatctctccttggcccttttaaaacctgaaagatggctttagtaatctatccttggccaggtgcggcggctcatgcctgtaatcccagtactttgggaggctgaggtgggcagatggcctgaggtcaggagttcaagaccagcctggccaacatggtgaaaccccatgtctactaaaaatacaaaaaattagccgggcatgntggggcatgactgtagacccagctattcaggaggctgaggcaggagaattgcttgagcccaggagtcggaggttacgttgagccgagattgcaccactgcactctagactgggcaacagagcaagactccgtctcaaaaaaaaaaaaaaaatctattcttgtctttaccccagaaattggctgtgtttctttttagcctgttggtatttcccatcaaaatgctgtcactaccaagaaattcctgtctgatacgcccatctcaggcttcagtttccccatggatgttgtcttttgtacttctgaccatctttttagggaggtggagttaga

SEQ ID NO: 4646 - DNA, 661 bp, Homo sapiens
  NPAS3
  misc_feature [331]..[331]: Chromosome 14, SNP identification no. = rs912854
  misc_feature [331]..[331]: allele = c, in linkage disequilibrium with rs7152037, respectively
  misc_feature [331]..[331]: n is a, t, c or g
catatgtcatcactaagtatgcagagagaaaaaaaggatgagaaatagggttcttgagcatcaaaggaaagaaaaggatgcgatttattcttaaataaagtccagcactgcctgctggctcaagtacagaccctgttctttgtcccttagaggaacagagctaggttagttagccacagtcatcagcttgaacagaaaagacccttttcacctataagtagctcccagttttctagtcaggaaaacaaacataattttacccggactaataaaattcttgaccacagctttgtcatttccgtcatctaaactgaacacttctgcttctacntgaaccaagaaaaatggagtcgaaaaactttctactcagaattctgtggctatcataggacaccaaatttctatgcaggctttgcaaatctggaagcagatctctgtaatacagggagtcacatctacatccaaacataattgtgatatagtggtggttaccagctgcaccccaggtgccctcatctgttaggactacattatctaagacacacacaactctactgggcttaatagatttaaatcaatgccttgaattaacaccagaaaagaaatgctgtaaagacacagatagataggcatggaagaatctgaacttacaaaagaaaac

SEQ ID NO: 4647 - DNA, 661 bp, Homo sapiens
  NPAS3
  misc_feature [331]..[331]: Chromosome 14, SNP identification no. = rs12886732
  misc_feature [331]..[331]: allele = g, in linkage disequilibrium with rs7152037, respectively
  misc_feature [331]..[331]: n is a, t, c or g
ttatatatatatatatattttttttttttaaatctagctgtaatgggttatttcataaataaggcttggggctggagcaggggcctccaagcctctagctcctgctcaaaagaagaaaaagttacttgtttgtgggtcaagaaaaagaaagtttgtaaaactcaaattctactagcctgttagacagagtgggaagtcttgtgagcttcttttcagtggtgtactccaccagacctcccaaagctaagcgtagtgggtactcttggcgaactggaatgttaaaatgacatttggatttgaatttaactacatgatagtttctgaaaaagtntatatgcttttgtagcattactaaaatacttatataggcacagatgttcagatattttaaagtacaagaacaataccagggataaagcaaatcagcagtataaactactaattctgtaagtaccatggtactggtaacacacagagaattatttttcttacgttatacatcagtagccatgttcatttttagtatttttacatttatcattgttttcccatggtgtaatgataggtactaacttccttataactctacaaatatgtttttcgtataatataaaagaaacaggccaacagtagttgttccaagtgaacactggcctatttc

SEQ ID NO: 4648 - DNA, 661 bp, Homo sapiens
  NPAS3
  misc_feature [331]..[331]: Chromosome 14, SNP identification no. = rs3844011
  misc_feature [331]..[331]: allele = g, in linkage disequilibrium with rs7152037, respectively
  misc_feature [331]..[331]: n is a, t, c or g
tagaaaataaaaatatataggggcattaaaaaaaaaaaagagagagaggcttataggcacttcctagcacaaccacatcatccataggactctaaaatacagagtgtaactgctctatgtggaaatatgaaatgggaaacaaaagagtgaaagctcagatatttccttctaaccacagatattttgaactaaccagatcatcactgtgtaggaactaacatcctccagaactaccactagtaggagttatgtagcgtaacgtagactgtgggaataaagccatcgctctggaagttggcttgtcttttgggtactttggtcttataaaatntaggtcagtctatgttttattttatgcctttctagtgtatttccagctttcctattccaaagcctaaaaataattctccatttcagtttctttcatcaacgacttttcacactttgatgcatagactaataatgatggctggatctcaccgttttttacccatgttacaattcatttcaattttcttctggccatactgacccttgttaatttctgaattctcatccatcattttttgagtttcacttagtcccagctgcaggactaggtatgtcatcactctttcagatcttaacctattcctttcaacactgtgctctgagatttcta

SEQ ID NO: 4649 - DNA, 661 bp, Homo sapiens
  NPAS3
  misc_feature [331]..[331]: Chromosome 14, SNP identification no. = rs12897225
  misc_feature [331]..[331]: allele = a, in linkage disequilibrium with rs7152037, respectively
  misc_feature [331]..[331]: n is a, t, c or g
gcaccaaaaaagctgttagcatttgtggccttgatcaagcttagtcacagctttctcatctttaaaaatggcttctcgcaactattccatttggaaaagctgtttatttttggtgacttttggccatcaggactttatatataactaatacaaaatgtactttggaacttgtcgccagatatttttttccttttttcagtcctgaaaatagtgtggtaaaatttagaaccttcattctagaagttacctgtgactttttaatggtgaataggattgtgtattcgaacagagtgggtactaaggtaattgttaggataattatgtaaaaggncagccaattatagatttataatttacagaggaaaattagaacttactcaaaatttaacctactttaaaaaatctatataacatttgaaaatactaatatcaattattatagaatatttactatgtaaatttctaactcttattcacactaaaaaaaaaatcaaagttcagccagcaaatattacatttgtaaagaaacatgaatatacaagtttaaataatcagagttattctatggtagttctttcatttctaggttattttctggattttccaaaacttttggggaacaatggaagatggccatttttcattattagcaagcatagat

SEQ ID NO: 4650 - DNA, 661 bp, Homo sapiens
  NPAS3
  misc_feature [331]..[331]: Chromosome 14, SNP identification no. = rs4007518
  misc_feature [331]..[331]: allele = g, in linkage disequilibrium with rs7152037, respectively
  misc_feature [331]..[331]: n is a, t, c or g
atggggctcttaataacttgatgagtttttgtaagtcagaagtcatgtctgatttttaaaacaaatcaagtaagtattttctggttatatatttactatacctagtatattgagaatatttttaagattggtaattggaaatgaagacattgattacagctgtatccaggtttttgtagccttctaaaaagtcaccatcatattttcaattgaatggctaaatagtctaccaaaggttacagaatctcactggattctccaaactctttgcaccagtgagttatattattgtgacacacagaaataaccatattgctgttgaaaaaatgtntccaccaaaagttaaagttgacactataattttaaagaaaacttttaccacttcttctatgcctggtattctctgaatttgcaagtgtaggcccagcaaaacattaaatgtttgatttattggtttgtttatagtatgctgacctaggagtagggtaggaaagtggttgggtgtttttggttttttagaccagcattatatattatatttcatttaaacacaattactgtatactgtttcccccatattcttaagttaggacaaaacaaaagtaaaatatttaaactagtatataaaaagaatggtgaatccatgatataacgatataaa

SEQ ID NO: 4651 - DNA, 661 bp, Homo sapiens
  NPAS3
  misc_feature [331]..[331]: Chromosome 14, SNP identification no. = rs17100933
  misc_feature [331]..[331]: allele = c, g
  misc_feature [331]..[331]: n is a, t, c or g
aagtatatggacgatggatgtttcccatctaaatgcattttccttcctttaatctttgcctggactatacctaggattttgtggatgctcttaagttcccatctttaaaatgtggggaaaagtatgcatctgtgcttgtgtgttacattgcacttttagggtctagaatctatagttatattaagaaaagagatacttgtgtattttttattttattaccatgtttcattcctgaacagtctcaaaattaaaataggtgtatcctgcccatgtttgataatttagaaacttcagttctgtcttttgaaaaaaaaattaataaggcatgctntgtcctgtactttcttttacaaatgtgtaccttggaacattgcagattttgtcctttaggtatcctaactatttgtattatgtatccctttgaactactgatgtccatcaaggtaacaataaggggaatgccaaggcacagaagtctgaaatagtgtaaaacaaaaacaaataatcaaatattaagagacaataatagacatttaaacaaaaatcctcattctttggcccatatctttttttttttttttttttttttgagaaagagtttcactcttgttgcccaggctggagtgcaatggcgcgatctcggcttaccacaacctctgcc

SEQ ID NO: 4652 - DNA, 661 bp, Homo sapiens
  misc_feature [331]..[331]: Chromosome 14, SNP identification no. = rs743223
  misc_feature [331]..[331]: allele = g, in linkage disequilibrium with rs10135561, respectively
  misc_feature [331]..[331]: n is a, t, c or g
acagaaaaccaaatatctcatattctcacttgtaagtggaagctaaacactgggtacacagggatacaaagatgggaacaataaacagtgaagattactagcaggaggaaagagggatagggacaaaggctgaaaactgcctattgggtactatactcactacctggtgacaggatcattagtaccccaaacctcaggatgtctctgtaacaatcctgcacatgtacccccaactctaaaataaaagttgaaaaagtaaaaaaaaaaaaaacaatttgtcagaagtcacacagctcctagaatttagattctaggcttttgattcaaatcnaggatttggcactggccacttagctccagagtccatgctcttaagccccaggccacacagcccaagttgagacttttagagaagtctgctatttcattgctgaactacatagcataattgatgacaggtatacacaggctacaaaaaaaaaaaaaagagagagattcctttgttgtattatagtgacttatgagtgtttttttgtttttggggtttgttttttttttttttgagacggagtctcgctgtgtcaccaggctggagtgcagtggtgcaatctcggctcactgcaacctccacctcccgggttcaagagattctcctgcctca

SEQ ID NO: 4653 - DNA, 661 bp, Homo sapiens
  misc_feature [331]..[331]: Chromosome 14, SNP identification no. = rs2025061
  misc_feature [331]..[331]: allele = g, in linkage disequilibrium with rs10135561, respectively
  misc_feature [331]..[331]: n is a, t, c or g
tggagaggaattttctgatcttctttttgaggaatataagcctatattctcagagccgaatgagagaaaggggtggggttcttgtttattcagtatgtagacttttactttgttcctcggttttaattttacctcagtgctgccctcagctgtgcctggagcacagggcacctccagttcggcctctccagaagtaaacttgtcttctgcctatcttgtgtttgttgggaggaggtgacctgggactctactactattgatgaagaatccgaaaaagtcttctattagccctgtgccacaccctacctatgaggtagactttgtctcttantcccccaaattccttgcccatttatttaccatcttccaaaattaattaacatttaacatcatttcctttactgagcttcttatgattttgggtttattagtgttcattcctttacttttgtatttcaggcttttgggaagaagcagaggtaatttcttttgcacaaaaatgtgtgcaggccgggagcggtggctcacacctgtaatcccagcactttgggaggccgaggagggcagattacctgaggtcgggagttcaagaccagcctgaccaacatggagaagccccatctgtactaaaaatacaaaattagctgagcatggtggtgca

SEQ ID NO: 4654 - DNA, 661 bp, Homo sapiens
  misc_feature [331]..[331]: Chromosome 14, SNP identification no. = rs17108596
  misc_feature [331]..[331]: allele = g, in linkage disequilibrium with rs10135561, respectively
  misc_feature [331]..[331]: n is a, t, c or g
cctaactttgaatgcttccaataaactcccttcttgcttaaggaactagagatgtatttccaataatttcaatcaagagtcttaaactgcgacaagtacggaattgaagtttaagtgttcagttattacttacttccataggcaatattcagatttttttaaatgtccagagagaggcacatccactggaagacctaagtagaagtgtctgtttgacttgcccaggatggttggcttgcagaccgtagctacatatagctcctcaatgccagagtgatgaagaaatggccatctcaaatgatacaatattggggctaaaataaactaaagntaacagcacatatttcataaattactaaaaaggaaaaccacattttaccttaggtatgttctataccctgctttatttcaagaaagacttcaaggagggttataaaaatgcataacagctgggtgcagtgattcatgcctgtaatcccagcactttgggaggccaagcaggtagatcacttgaggtcaggagttcgagaccagcctggccaacatggcgaaaccctatctctacaacaatacaaaagttagctgggcgtggtggtgcacacctgtaatcccagctacttgggagactgagacaggagaattgcttgaacccaggaggcgg

SEQ ID NO: 4655 - DNA, 661 bp, Homo sapiens
  misc_feature [331]..[331]: Chromosome 14, SNP identification no. = rs8019396
  misc_feature [331]..[331]: allele = t, in linkage disequilibrium with rs10135561, respectively
  misc_feature [331]..[331]: n is a, t, c or g
atagatagatagacagatagatagatacaaacatctattagagttctctggaaaactctaataaaagtatcaaagaatttatgataaaatcataaaatgaggatggggaaaagataatgcagggataaagttttcatccaagatgcatgccatagatcttgcaccctttttagatatgggccacaattttgactctgagtttcctagcaaccaactcaaaaaagtaaacctaattatatatataatttaagagtatccataaaataaaaatatagttgacttgaacaatgtggaggtgaggggtgctggccatgaatgtagtcaaaagtcnacttaactactaatagctactgttgactggaagccttacctataacataaacagtcaactaacacatattttgtatgctgcatatatttatatactgtattcttacaataagataatctagagaaaagaaaatgttaagaaaattataagtaaaaaatatacttacatcatcttcacactgagtaggctgaagaggaagagaaggggttgttggtcttgctgtctcaggggtggcaaaggcagaagcaaattcatgtatactaatcacccgagaatgcaaatcaaaaccacaatgagatacccatctcataccagctagaatggccttat

SEQ ID NO: 4656 - DNA, 661 bp, Homo sapiens
  misc_feature [331]..[331]: Chromosome 14, SNP identification no. = rs10150756
  misc_feature [331]..[331]: allele = c, in linkage disequilibrium with rs10135561, respectively
  misc_feature [331]..[331]: n is a, t, c or g
gcacttgaccaaagttagtaacaaaatcatattttgttagtccatgaggaacagtaatatagtacaaaaaacagtgcaaacccagaaaacaagatgagagggttgcttttcactgtggtatcaagagagctgtaaatacctcttttgagtaagaaatttaaaagcatatgatacatctcgaggagtgtatataagatttgcaaagtataaatttgacctcattcaccacaataaaaattttaatcttataaaaaaactctatcaactatttttcccaagtcagaaaaacaaaaatggaacttaagataaaaataagttcaagttgaataanagaaattggaagtaaagtttcctaaaaattgaatttgttattttgttccaagagtactggtccagtttttaataaggcaaaactcttcaaaagaacattacactgacctttcaggagttatttctctgggattataactgaccttaataattctttgctgtcaatttttataattaatttaattgatcttctgctggtatgttaataatgcagatattttattgtaagaaactatccagcttcattgtttgcttttcttcctgaccattaaaaataacacagtgcacatgattttttttaatttgatatgtttacaaaccaggctttcca

SEQ ID NO: 4657 - DNA, 661 bp, Homo sapiens
  misc_feature [331]..[331]: Chromosome 14, SNP identification no. = rs10149971
  misc_feature [331]..[331]: allele = g, in linkage disequilibrium with rs10135561, respectively
  misc_feature [331]..[331]: n is a, t, c or g
ctgaagagctacactgcctcctcaaacatgtgatgtgctctttggcctccctacctgtgtgctgttcctttagctggaattctctttcctcttatccaacctaactacctgtcggggcttattgattaattagatacgactggaaagaaaaatgacctcaaggatgactccaaaatatttgagttgaatgataggaaggctggaactgctagcaactgaaatggaagacaatgggaggaggcatttgaaggggaagatgagggaagctgcaaatgcccgcacccaagcatccaggcaagctgttcaccctccacaggcagcatctgccganaggatgagaagtatttttctaatttgcataaaagcaaatggtatgataactttaagaaaaatcacagtttggtttcacacatgttaagggatttttaaatatatagccaagtaatttgtcaagtaaacagttgaatgaacaaatttggagatccctaaacaattccagaagaggaaatataacttgggagttgccagcttaattatactatttaaatccatgagactggatgagatatcaatggagtgggaacaaataaaggtgagatccaaggactaaggtctggaatatccagtgttaataaaccaggagtaacaagggagaccaaga

SEQ ID NO: 4658 - DNA, 661 bp, Homo sapiens
  misc_feature [331]..[331]: Chromosome 14, SNP identification no. = rs11844428
  misc_feature [331]..[331]: allele = t, in linkage disequilibrium with rs10135561, respectively
  misc_feature [331]..[331]: n is a, t, c or g
gggtttaagagagaatgggaggtgaggagttggagacaggaagaaaagacaactctttggaagtttggctgtaaaggaaagcaggaaaatggagcagtcgctggcaatggtactaactaccatttgctgtgttttaagttgggagacataactgcatgcctggaaatactggaaattttccagtatagaaaggggaaacaatgatgaagaacaaagaagagagaattagtggagtaatgtccttgagtagataataaatgatgggatccggggaacaagtgagatgactggcctcggccaagagcacagacacttctttcataaggatagnagaaaaggcagagtccagggcactgacacaggtaggcaggtagaagtagtgatgggaattctggcatgtctattcttatctattttctcagagaaatgagaaggtaagtcatcacctgagagcagggactgcaaaatactgtaagcatcactggcaaaatattaaagtctgacacacgcataaaaaggagttatcaagaatgaggaacaaaagaaactctcattcgctactggtggtcatgaaaattggtaagcccacttagaaaatagtaacattattcagtaaaggcaaacatgtgcatatagtatgacccagtaatgccattcctag

SEQ ID NO: 4659 - DNA, 661 bp, Homo sapiens
  misc_feature [331]..[331]: Chromosome 14, SNP identification no. = rs11844342
  misc_feature [331]..[331]: allele = g, in linkage disequilibrium with rs10135561, respectively
  misc_feature [331]..[331]: n is a, t, c or g
gttggagacaggaagaaaagacaactctttggaagtttggctgtaaaggaaagcaggaaaatggagcagtcgctggcaatggtactaactaccatttgctgtgttttaagttgggagacataactgcatgcctggaaatactggaaattttccagtatagaaaggggaaacaatgatgaagaacaaagaagagagaattagtggagtaatgtccttgagtagataataaatgatgggatccggggaacaagtgagatgactggcctcggccaagagcacagacacttctttcataaggataggagaaaaggcagagtccagggcactgacncaggtaggcaggtagaagtagtgatgggaattctggcatgtctattcttatctattttctcagagaaatgagaaggtaagtcatcacctgagagcagggactgcaaaatactgtaagcatcactggcaaaatattaaagtctgacacacgcataaaaaggagttatcaagaatgaggaacaaaagaaactctcattcgctactggtggtcatgaaaattggtaagcccacttagaaaatagtaacattattcagtaaaggcaaacatgtgcatatagtatgacccagtaatgccattcctaggtgtttatcttatagaattgtctgtgca

SEQ ID NO: 4660 - DNA, 661 bp, Homo sapiens
  misc_feature [331]..[331]: Chromosome 14, SNP identification no. = rs17108654
  misc_feature [331]..[331]: allele = g, in linkage disequilibrium with rs10135561, respectively
  misc_feature [331]..[331]: n is a, t, c or g
tcaagaatgaggaacaaaagaaactctcattcgctactggtggtcatgaaaattggtaagcccacttagaaaatagtaacattattcagtaaaggcaaacatgtgcatatagtatgacccagtaatgccattcctaggtgtttatcttatagaattgtctgtgcatgattattgtcctgtacaagaataatcatggcacgatgctcttacaaaaggtggttttaaaaaacttttttcaaagaaatgttaaccaatcatcaatacagtagttaccactgggaggaaggaggaggctgtgatcatgaatgaccatactggaagattctgaagnaatagcatgtcctatttcttaacctggatgatttgttaaactctaaatatatgctttatgcattttatccttattttttgtttttttctctcactttagcatgcatcagaagcattcttatttaaacattttttaatgtttaatttcaacattaaaaaaatatttttaatcccttagtcatgccacttaaagttaacccggttacttttgatttacgctgtttcactgaataaatagtctgtcaattcaagattctctccttcccctacaccatgcttctcctgcaatgatgacaaaatttcccaaggggtttatatgaaatcctgacag

SEQ ID NO: 4661 - DNA, 661 bp, Homo sapiens
  misc_feature [331]..[331]: Chromosome 14, SNP identification no. = rs10483544
  misc_feature [331]..[331]: allele = a, in linkage disequilibrium with rs10135561, respectively
  misc_feature [331]..[331]: n is a, t, c or g
tgagagggtcgcttggttgaaagagggcacaggtctcagtgaggaggattcggtgtgcactgactttgagattggcatggggttgaggcaggaactgagtatatacatgtgtgttagataccaatgcatgatgtccggtgactggtggggtgagctacacttttgtagatgctggtgagtacaggtaattacatgtggagcagatgcctttctccagctgtcaggatttcatataaaccccttgggaaattttgtcatcattgcaggagaagcatggtgtaggggaaggagagaatcttgaattgacagactatttattcagtgaaacagngtaaatcaaaagtaaccgggttaactttaagtggcatgactaagggattaaaaatatttttttaatgttgaaattaaacattaaaaaatgtttaaataagaatgcttctgatgcatgctaaagtgagagaaaaaaacaaaaaataaggataaaatgcataaagcatatatttagagtttaacaaatcatccaggttaagaaataggacatgctattgcttcagaatcttccagtatggtcattcatgatcacagcctcctccttcctcccagtggtaactactgtattgatgattggttaacatttctttgaaaaaagttttttaaaacc

SEQ ID NO: 4662 - DNA, 661 bp, Homo sapiens
  misc_feature [331]..[331]: Chromosome 14, SNP identification no. = rs7159520
  misc_feature [331]..[331]: allele = a, in linkage disequilibrium with rs10135561, respectively
  misc_feature [331]..[331]: n is a, t, c or g
ggggtttatatgaaatcctgacagctggagaaaggcatctgctccacatgtaattacctgtactcaccagcatctacaaaagtgtagctcaccccaccagtcaccggacatcatgcattggtatctaacacacatgtatatactcagttcctgcctcaaccccatgccaatctcaaagtcagtgcacaccgaatcctcctcactgagacctgtgccctctttcaaccaagcgaccctctcagcacttttgcaaggccctgcaggctcagggaatttcagccactttctctgtgctgccctgttgagcatgaggccttagtgaagctgcccnggcttattcgtcatttgctgtccgtcttcctgcacccataccatggcaagcaaggaacaaatcttcatgctctggccttctcccaaatctgccatgtttctccggcttcatcctcttcacatccattccctacaaatatccacatgctgcatcccctctattttcaggtttatttaatacattttgtcctctgagtccatcaggctctgacttttaatatttaacaacaaaagctttggggatctagaaaattctcaagtgcctggtgtttgtcattacctttaattttttccggtttgcttcatgtactgtgaagccctgtgattaggc

SEQ ID NO: 4663 - DNA, 661 bp, Homo sapiens
  misc_feature [331]..[331]: Chromosome 14, SNP identification no. = rs17108664
  misc_feature [331]..[331]: allele = t, in linkage disequilibrium with rs10135561, respectively
  misc_feature [331]..[331]: n is a, t, c or g
ttactcttatcaaaattatttggtgagtttttttgctttttcataaatgatttttttcaaaatgctactaaacaaccacatcaacctttaaacaatgaattaaaattaaaatttaatatctaaatagtttttacaaaagcagaaatagctaaaaattgagtctcaggttaagtgagaggtggaggagagttactaatctatatagaataatttataatctgatcagcagagtgacagtgctgaatgagctttgaaagatggttttgtctgataagaactcatgttgacacaaaccttctctttgtcctggaatcttttctcaaaggtatgnatgagtgcactaaaaaagaatgaccaagagaaagaaaagtaagagctgagttccagccatgagttagagtgctgaccagaggcagtcaaagcagcccccagcctctgtaaactcagcagaggatgcaccgtgtcctggcttggctgtccccaaaaaagcatggggggcaggacccagagcagggctcaggaggagatggcccctgtggagctggcatgggagagagccctatttgtgtgaatgaggagcactccctgccccttgaggagtcacctcaggggagctggtcctccacacagaggccaccccttctttcagactgccatcctc

SEQ ID NO: 4664 - DNA, 661 bp, Homo sapiens
  misc_feature [331]..[331]: Chromosome 14, SNP identification no. = rs10148805
  misc_feature [331]..[331]: allele = g, in linkage disequilibrium with rs10135561, respectively
  misc_feature [331]..[331]: n is a, t, c or g
taagttttttgggtacacagtgggtatatatatttatgggatacatggtatgttttgctacaggtatgcaatgggaaataatcacaccatggagaatggggtattcatcccctcattatactctaagttgttttaaaatgtacaattaagttattattgactattgtcaccctgttgtgctattgaatagtaggtcttattcattctttctattttttgtacttactaaccatccctgtctccccctcagtcccccactaccctctactctcgatgtccatcctctattctctgtgtccatgagttcaattgttttgatctttcgatcccncgaataagtgagaacatgtgatgtttgtctttctgtgcctggcttatttcagttaacataataagctccaattccatccatgttgtggcaaatgacaggatctcattcttttttatgactgaatagtactccattgtgtatatataccacattttctttatccattcatctgttgatggacacgtaggttgcttccaaatcttagctattgtggacagtgcaatctacttttaaatccactgagtagatttttatttcaggtattatatttgtcagttctaaaattttaatttcactgcatgttctcacttataagaaggagctaaacaa

SEQ ID NO: 4665 - DNA, 661 bp, Homo sapiens
  misc_feature [331]..[331]: Chromosome 14, SNP identification no. = rs11848150
  misc_feature [331]..[331]: allele = c, in linkage disequilibrium with rs10135561, respectively
  misc_feature [331]..[331]: n is a, t, c or g
tctgtgcctggcttatttcagttaacataataagctccaattccatccatgttgtggcaaatgacaggatctcattcttttttatgactgaatagtactccattgtgtatatataccacattttctttatccattcatctgttgatggacacgtaggttgcttccaaatcttagctattgtggacagtgcaatctacttttaaatccactgagtagatttttatttcaggtattatatttgtcagttctaaaattttaatttcactgcatgttctcacttataagaaggagctaaacaatgtatacacattaacatacagacaggaataanaggtggtggagactccaaaagggaggacaggagaaagataaggaatgaaaaattacctattgggtacaatgtacagtattctggtgataggtacactagaagcccagacttcactgctaggcaatatgtccatgtaacaaaactgcccttgtactctctaaatcgacaaacattaaaaataaataataaaattttcattttgttcttttttatactttcagtttatttgctattatattttagctacttgttcattgtaaaatatttctcttttatatctttgaatgtagctattactgctgcattgaaattcttttttattattatact

SEQ ID NO: 4666 - DNA, 661 bp, Homo sapiens
  misc_feature [331]..[331]: Chromosome 14, SNP identification no. = rs11157034
  misc_feature [331]..[331]: allele = a, in linkage disequilibrium with rs10135561, respectively
  misc_feature [331]..[331]: n is a, t, c or g
agatggtatctcattgtggctttgatttgcatttctctaatgacaagtatgagctttttgtcatatgtttgttggctacataaatgtcttcttttgataagtgtctgttcatatccttcacccactttttgatggggttgtttggttttttttcttgtaaatttgtttaagttctttgtagattctagatattagccctttgccagatagataggttgcaaaaattttctcccattctgtaggttgcctgttcactctgatgatagtttcttttgctgtgcagaagctgtttagtttaattagatcccatttgtcaattatgcctttgttnccattgcttttggtgttttagtcatgaagtctttcccatgcctatgtcctaaatggtattgcctaggttttcttctagagtttttatggttttaggtcttatgtttaaatctttaacgaatcttgagttgatttttgtataaggtgtagggaaggggtccagtttcagttttctgcatatggccagccagttttcccgacactatttattaaatagggaatcctttccccattgcttgtttttgtcaggtttgtcaaagatcagatggttgtagatgtgtggtattatttcttagggctctgttctgttccattggtctgtatctctgtt

SEQ ID NO: 4667 - DNA, 661 bp, Homo sapiens
  misc_feature [331]..[331]: Chromosome 14, SNP identification no. = rs12323578
  misc_feature [331]..[331]: allele = g, in linkage disequilibrium with rs10135561, respectively
  misc_feature [331]..[331]: n is a, t, c or g
atcttggttgcataaaatgagttagggaggattccctctctttttattgtttggaatactttcagaaggaatggtaccagctcctccttgtacctctgatagaatttggctgtgaatccatctggtcctgggcttttttttggttggtaggctattaatttctgcctcaatttcagaacttattcatctattcagggatttgacttcttcctgatttagtcttgagagggtgtatgtgtatttatccatttcttctatattttctagtttattcacgtagaggtgtttacagtattctccgatggtagtttgtatttctgtggaatcagtngtgacatccccctctcattttttattgtgtcttttttattcttctctcttttcttctttattagtctggctagcagtctatcaattttgttaatcttttcaaaaaaccagctcctggattcattgatttcttgaagggtttttcgtgtctctatctccttcagttctgctctgatcttagttatctcttgccttctgctagcttttgaatttttttgctcttgcttctctagtttttttaattgtgatgttagggtgtcgatttcagatctttcccactttctcctgtgggcatttagtgctataaattttcctctaaacactgctttag

SEQ ID NO: 4668 - DNA, 661 bp, Homo sapiens
  misc_feature [331]..[331]: Chromosome 14, SNP identification no. = rs2144528
  misc_feature [331]..[331]: allele = t, in linkage disequilibrium with rs10135561, respectively
  misc_feature [331]..[331]: n is a, t, c or g
tgtctccctcttctccccttgctgccacctcactaaggggtttcacctgcatctgtctctcactcagctctaggtgtgtgtgtgtgtgtgtgtgtgtgtgtgtgtgttttgttttgtttttagctctaggtgtttttattgcctatgcactccctcttctcattggcccttcttcagggcatctttgactggtgacctaattcgttcaaattattgttttaatgttgtaactcctccacaatatacatacatttatagaagcatattttgaaatatttatctatgcgttttcttatttcttttagcactttcagcattaacattagacagngaggttgaatcttatagccccagggaaggaaggacacaaggaagcacagagagaaggaaagatttcattgagcttctaactggattaaaaatcagacaaacactagaggcaatagacagaaaatttctggattttaatggcaagtgttggtttctgcttctggtaatggtagagtagcttctgtcagaataaccctctctcaaataacgacaaactctgcataaaataaaaacacaaccttcggaaggcattagaaatcaagccaaagcaggcacatgcatatgaattatggatggacatttggagaaagggagtggcactgggtgggtt

SEQ ID NO: 4669 - DNA, 661 bp, Homo sapiens
  misc_feature [331]..[331]: Chromosome 14, SNP identification no. = rs11623907
  misc_feature [331]..[331]: allele = a, in linkage disequilibrium with rs10135561, respectively
  misc_feature [331]..[331]: n is a, t, c or g
aaacacacacacacacacacacacacacacacacacctagagctgagtgagagacagatgcaggtgaaaccccttagtgaggtggcagcaaggggagaagagggagacatctggcaggtgaaggagatgctccaaagatagcatagaacccctcaaaatgagaaatccccaaattttagaataattatttcatggcactttaagactgatacttaacaaattacctaaatctaaaagctttattttagagacaaggagactgagccccacactttgcctgactcataatttagtcaagatgcctactcctcccagcacagtgttggtgctntcatattatttttagcaacagcctggtacctgttcacaccttcttttggttggttttttgactaatcaacgttgtgtgtgatagctttaggtctcagccattcaggtgatgcttaaacatgatggggaattctaacatagaactttttgggtttttttctatgtatatctcagagtttaagtcacagcagagtgaattgaagcttttttatgattgtgtagaaaaccctaggctccaactctcttttctaattatgataaagccacgtggcctgtctcggattgcttggcatagtgtccgggtatcagtggctcacaggattttacaaag

SEQ ID NO: 4670 - DNA, 661 bp, Homo sapiens
  misc_feature [331]..[331]: Chromosome 14, SNP identification no. = rs11623945
  misc_feature [331]..[331]: allele = t, in linkage disequilibrium with rs10135561, respectively
  misc_feature [331]..[331]: n is a, t, c or g
gacagatgcaggtgaaaccccttagtgaggtggcagcaaggggagaagagggagacatctggcaggtgaaggagatgctccaaagatagcatagaacccctcaaaatgagaaatccccaaattttagaataattatttcatggcactttaagactgatacttaacaaattacctaaatctaaaagctttattttagagacaaggagactgagccccacactttgcctgactcataatttagtcaagatgcctactcctcccagcacagtgttggtgctgtcatattatttttagcaacagcctggtacctgttcacaccttcttttggttngttttttgactaatcaacgttgtgtgtgatagctttaggtctcagccattcaggtgatgcttaaacatgatggggaattctaacatagaactttttgggtttttttctatgtatatctcagagtttaagtcacagcagagtgaattgaagcttttttatgattgtgtagaaaaccctaggctccaactctcttttctaattatgataaagccacgtggcctgtctcggattgcttggcatagtgtccgggtatcagtggctcacaggattttacaaagaataatttggattagctcataaatttattgaaggaggtatctattagatgtt

SEQ ID NO: 4671 - DNA, 661 bp, Homo sapiens
  misc_feature [331]..[331]: Chromosome 14, SNP identification no. = rs11628564
  misc_feature [331]..[331]: allele = c, in linkage disequilibrium with rs10135561, respectively
  misc_feature [331]..[331]: n is a, t, c or g
ctttaagactgatacttaacaaattacctaaatctaaaagctttattttagagacaaggagactgagccccacactttgcctgactcataatttagtcaagatgcctactcctcccagcacagtgttggtgctgtcatattatttttagcaacagcctggtacctgttcacaccttcttttggttggttttttgactaatcaacgttgtgtgtgatagctttaggtctcagccattcaggtgatgcttaaacatgatggggaattctaacatagaactttttgggtttttttctatgtatatctcagagtttaagtcacagcagagtgaantgaagcttttttatgattgtgtagaaaaccctaggctccaactctcttttctaattatgataaagccacgtggcctgtctcggattgcttggcatagtgtccgggtatcagtggctcacaggattttacaaagaataatttggattagctcataaatttattgaaggaggtatctattagatgttcctgtctgtctgtgtggctgctattgacaataataaaatgatgtgagtttcaaattctcctgtcccataatgccttcagattttatcagtcagaatctgcattctttcctaaggtatctttttatcatctcaaataagaatgaca

SEQ ID NO: 4672 - DNA, 661 bp, Homo sapiens
  misc_feature [331]..[331]: Chromosome 14, SNP identification no. = rs10141081
  misc_feature [331]..[331]: allele = g, in linkage disequilibrium with rs10135561, respectively
  misc_feature [331]..[331]: n is a, t, c or g
tgcagtgacaagcctggtgacctctatactatataatctaaattcatgtatactattaataaatattttctaaatgctgaattctaatcgttcttaaaacataaagtgatttattatttctaaaacactacctatgcaaatatactacagaataaatgatatctgattaagcaaatttacaaaatctctaacaaactccactaggctatgagataatattcagacactgccatcaaaattccatgcaaggacccttaaccaataacaatggtcagtgcccatgagccggagcaggaagagaggtaagagacatctttttgacaccttcacntccctttgactcttggccagatttttttccccgccatgcccctagcagtttttggacactatcttccttagcctggacaaagtaaataatcaatactggccccctttaacctccagacaactttatcctatctgaatatagttggtgtataatattaattggacactcacaccaacttattttttgtgagtgtcctatggctaatttcaaaccctctgctctaagtattgaatgtatccattcaatgaacaaatatttgagtgcctgctagatgtcaggcaacataacaagacagacctagacaaagaaggggatgggtgttccagacaa

SEQ ID NO: 4673 - DNA, 661 bp, Homo sapiens
  misc_feature [331]..[331]: Chromosome 14, SNP identification no. = rs17108696
  misc_feature [331]..[331]: allele = g, in linkage disequilibrium with rs10135561, respectively
  misc_feature [331]..[331]: n is a, t, c or g
tctgctctaagtattgaatgtatccattcaatgaacaaatatttgagtgcctgctagatgtcaggcaacataacaagacagacctagacaaagaaggggatgggtgttccagacaatggaaggcctgtgtatagttttcctagtgccaaccaagagcatctttggctgctgagttgcctcttgccactcggcacactaatccatctgggatcttgagtgatcttacctctgttaatctcaatctatctaagactttatatcaagaaaaataagattttattgtataagtacttattttagtggtagtttgtgattcagcccgttattgttnatctttgaaaattagacttcaaactatactacaaggctacagcaaccaaaacagcatggtaccggtaccaaaacagagatatagatcaatggaacagaacagagccctcagaaataacgccgtgtatctacaactatctgatctttgacaaacctgacaaaaacaagcaatggggaaaggattccctattcaataaatggtgctgggaaaactggctagccatatgtagaaagctgaaactggatcccttccttacaccttatacaaaaattaattcaagatggattaaagacttaaacgttagacctaaaaccataaaaaccctagaag

SEQ ID NO: 4674 - DNA, 661 bp, Homo sapiens
  misc_feature [331]..[331]: Chromosome 14, SNP identification no. = rs11627264
  misc_feature [331]..[331]: allele = c, in linkage disequilibrium with rs10135561, respectively
  misc_feature [331]..[331]: n is a, t, c or g
gagcagggataaaagggcaggtggccggttcagaaagcaaagaggacagtgcacaatactaggttaaataggtagtagacattttacagatgagtcctttctgaggactcttaacctcaagaaagttaagtaacacacccaagcttacccagctggaaactgaaagccagtcccagaatctaggtccgtttgactcaaagtctatactcctatcccctccagcagacttcccaaatcttccagattttaagacttacttgagctgcttgttaatatacagtttccaggcctatcctaaaactccagaaccaaaattccataaagagcagcntcaggtagagtccctcaggaaagagacagtacgttcaaagtggataatttgagaggagcttaataaaggtcctagattagtccctaatacaggagggaagcccaatctccaaaatcttctgtttctcccacttaaaaatgtagaaaacatgcactcactgaaccaaagatgatgcctgtgagttcagtgccatcattctgtcaattaatttggctttcacataaggggctgttttgctagaatacagaattactacattatgaaatgctaattgtttttgctatcctgcaagacttgcctggaatatgagatgcgcattaagatataata

SEQ ID NO: 4675 - DNA, 661 bp, Homo sapiens
  misc_feature [331]..[331]: Chromosome 14, SNP identification no. = rs993675
  misc_feature [331]..[331]: allele = a, in linkage disequilibrium with rs10135561, respectively
  misc_feature [331]..[331]: n is a, t, c or g
aaatttctcttagaatagtgtttggaaagaaaaatgagctaaaaaagggagaaagacagtagttattaactaattattccaaacaggactttgggtaataacaaagaggaaaaaatgctttgcatccatccggttgaacagggtgcctcttctggtttcagtccagccagtcatcacagacacaaaaatatcagctctggccctcagcatttgcaacgagtatttgacctttccattttaaaggaaatggggaacaaagggattacataattaaaaatctgtttctgtctcttaaaagcaattcagtgtaggtcaggagccaactgtctcncttcccttctaattgttttacgctggctcctggtaccctgttcttgtttctcctgtgaatagctcattagtgttgggcagatgttcccattgggtgcaccatgttaatggagaaacaaaagaggcagcattgtgatccaagagaagttaatattgaatccaaaatagaataatgaataagaatatgtgcttcctacatgcctgttagcaacaaactctcaattgtggcttattttctatatgacttacttggttaacctcctgttaacaagaatggagaaaaaatattcaccagtttggctgttaggtgctgatactgttcacttttacc

SEQ ID NO: 4676 - DNA, 661 bp, Homo sapiens
  misc_feature [331]..[331]: Chromosome 14, SNP identification no. = rs926970
  misc_feature [331]..[331]: allele = t, in linkage disequilibrium with rs10135561, respectively
  misc_feature [331]..[331]: n is a, t, c or g
agtataaaatctcaaattcaaagtgaagctgagtcattcctgggtctggagatgcctactatctgattgaagaaatcaagagtactgcagaccactgggacctgcctaggtggaactcagcacaactctggtgcagctggaaagaaacatttgggaacattcagattcatagtttttgggtataacttggaggatatttgaaagcacttcaacggaattgaacactcaggaggtgggggacagatgtttacaggccagtgttagatggaggggaagtaaaaaccagggttagactctctggccagaacttgaaatattttcctggttattngcttgtccagtactttctgttcaaatgttcaaaggtcaaacttgatgtgtcctcatgtccaaaagcactttttaacttacatttctccagttgttaaagagtaaagtcatgtttttccattaccttccaccttcttgctgctcattgttcctcattcacccatttttgttaatgtattctggattattgtaaattttttttaattgtaaaaatctagatttaaaaattccagattattataaaaatataaaaaattgtatctattaagaatgttttgacattgctttagtttagtttttcttttttttctttatttttactttttttgag

SEQ ID NO: 4677 - DNA, 661 bp, Homo sapiens
  misc_feature [331]..[331]: Chromosome 14, SNP identification no. = rs10139666
  misc_feature [331]..[331]: allele = g, in linkage disequilibrium with rs10135561, respectively
  misc_feature [331]..[331]: n is a, t, c or g
ttaggtgcccttaggaaacttgatcccacccctttgcttaaggaagagacggaggctggctccttagtccagcagagagatgcaagcaggaggatgtggacatgctgattgacatgactagtatactaatgttaagaattagggttttctactctgtacagataactttagactttattaattaacagatcttatctgctatgggaacagatccaaatttaacatacagcatagctacattataattaaacacattttgtgatcacatccttcttaataaataaaagtaagctctggacatgtttaaacatgtttctatttgacaatcacngcttcagtaatctatttaataataagaaatccccgaatcactccacagagctattattttgtggaaggtcctgcagaaaggggaggatttttaacccagttagtttccttcaacagatacaggcagattcttaagtgttacagatagctaatgataccaacttaaaaccaaaaggggcagatggggaagcagatgtagctgtcaccgtatatataggctgagtacgcacagcaggtgcactgaatgttcttgccaaagaacctgcaataataaaacattagctccctgaaaccatgctggactttagactccaaatggaaaataatcatt

SEQ ID NO: 4678 - DNA, 661 bp, Homo sapiens
  SEC23A
  misc_feature [331]..[331]: Chromosome 14, SNP identification no. = rs10483543
  misc_feature [331]..[331]: allele = t, in linkage disequilibrium with rs10135561, respectively
  misc_feature [331]..[331]: n is a, t, c or g
gtcagtgaatgtaggtatgctatatgggtgtttattgtacttctctctcaactttaatgtagtcttgaatttttaaaaaacaggtgaggggaaacagggtattttggggttttaagcctgagtgactaggaaaacatatgtcaataaatgggagagtggagagaaattgtttggtttagacactgagtttgaggtactatctagaaggccttattgagccacaataagatgaccatattgattatggccatgttgagtgggctgttggcaatttgggtttgatggtcagggcaagaatgagaaaggtgataaagtcatcacagtaaatgcntgtctgaagagagagtaaagaggtaaaggagagatgagacaaaaacttcaggggagtacaagtggtaggagtgtttagtgaattatcagagaggcagaatgaaaagaatagtatgtcataaaaggtgactttatagaaggaagaagaaggaggtaacaaactgacatgccgcagacagttgaagagggatacagagtgagaaaaggtgcttggatttgatggctaggaggttattcgtggcattgtgtaagcggctttagtatggtggttgagtaagaagataaatttataaggaattagtgggtgagaaagaagcggaggtcgaaagta

SEQ ID NO: 4679 - DNA, 661 bp, Homo sapiens
  SEC23A
  misc_feature [331]..[331]: Chromosome 14, SNP identification no. = rs1884384
  misc_feature [331]..[331]: allele = t, in linkage disequilibrium with rs10135561, respectively
  misc_feature [331]..[331]: n is a, t, c or g
cagtaacaactatcttacgtgtttatcttacagtttatgtttcatttaagaagatcttctttcctgcaagtttttaacaatagtcctgatgagagttcatattatcgtcaccattttatgcgtcaagatctgacccagtctctaattatgattcagcctatcctgtatgcgtattcttttagtggaccaccagaggtaagagggacagaaaaaaataaattggtcttgttactgcaatgtgtggcattaaaaaagtgaaaataactaaaaaaatgcatatagttactaaatataagaatttaactaaaagaatggacatctcaacctattnatgtattcgcttaaaatatttatgaatgtttactatatgctagataccatgtaggctgtattagaagattgttaaatttttttttttaaaggagatggaagagactttcagatcattttgtccagccatttggttaatcaaatcctccaaagcatatgattattctttacgtctttaacaatgtccagaagtgattataattctgtagactgtagcttattccagagtttagtgtctgtgacagttatgacattctgtctaaacaaaggctcttgttttaatctcattttcctttgtttttttgagaacataaaaaatagttgattataa

SEQ ID NO: 4680 - DNA, 661 bp, Homo sapiens
  SEC23A
  misc_feature [331]..[331]: Chromosome 14, SNP identification no. = rs17092044
  misc_feature [331]..[331]: allele = a, in linkage disequilibrium with rs10135561, respectively
  misc_feature [331]..[331]: n is a, t, c or g
ctcccaggttcacgccattctcctgcctcaggcatccgccgccacgcccagctaattttttgtatttttattagagacggggtttcactgtgttagccaggatggtctcgatctcctgacctcatgatccgcccgtctcggcctcccaaaatgctgggattacaggcgtgagccaccgtgcccggccaaaaacaattttttgaacacctgtaaaatgctctagtatcaactacttgagtcacgaggagcagtccttatttacaacccaaccaaaacactaataccggtggaaaacagactgaagcataaagaaggtatatccaagacccantatttgagttattcagaagtaataaaactgggcagataaagcaacagtaatgattttcctgaggaaaataacatcccttacaaaaaggctaattccttctttaattcagtaattatttatgcataaaggcagccacataaaaggaccctaggggtcaatgcctaacctctataagaaaatggtaatgacaaaagcggtatctgtaaaaacagtaaagctaaagtgtttcatcccattggtgcagcaagagaaaacctggcttgcagggaaagtcccaatagtcttaagacagaagatttcctgagtcaagtctgattagatgaagtgttt

SEQ ID NO: 4681 - DNA, 661 bp, Homo sapiens
  SEC23A
  misc_feature [331]..[331]: Chromosome 14, SNP identification no. = rs11628784
  misc_feature [331]..[331]: allele = g, in linkage disequilibrium with rs10135561, respectively
  misc_feature [331]..[331]: n is a, t, c or g
gagacctgtctgatctaatgcacacgcatagatatcaataacatggccagttgtagcagctcgattagccaatgcttcaaaatgctacaaaagattttcttaattaaaataatatacaaaattgtcctataaatcttttttccattaacagatcaaaatgatctaaggactaaaagagtaactcataatttaaattatgattagttatttaactttctgtaatgttaataaaattatacaacaacttctgtgagtctgacattttcacattttccttgaaagccactctttctagataaacccctaaatgaagccaaacttaaagaaagtnctattgcatatcttgttcttcctatataaacatagcacaaaaacaacaggctgggcgtggtggctcacgcctgtaatcccagcattttgggaggccgaggcaggcagatcatgaggtcaggagatcgagaccatcctggcaaacacggtgaaaccccgtctctactaaaaatataaaaaattagccgggcgtggtggtgggtgcctgtattcccagctactagggaggctgaggcaggagaatggcatgaacccaagagatggagcttacagtgagtggagatcatgccattgtactccagtctgggcaacagagcgagactttgcctca

SEQ ID NO: 4682 - DNA, 661 bp, Homo sapiens
  SEC23A
  misc_feature [331]..[331]: Chromosome 14, SNP identification no. = rs8018720
  misc_feature [331]..[331]: allele = g, in linkage disequilibrium with rs10135561, respectively
  misc_feature [331]..[331]: n is a, t, c or g
tgccctaaaaccacacaaaaacaagttttttccaaagttcaaaataaaaaataaggaaaataacaaaactaaagtaactccttacattgttaagacaaaaaacaaaccattttaatgacatgattttgactcaattctttaaaaagtatgttaatacaatttacttatattcctaaaaatatttaacaatatagtatcactgaatgcctatgttcaagggtatggaatgtttaaaatagctacagaaacggtcaaattctcttcatcatatttattacctgttggaaggaggtggctgctgtacctgaggaccacgtgttgcttgagtaantggtactttagagagccccagcatttcctgtaaagagattacttgtgcaatattcatttaattacttttacaaagatttatcaactatttatcatgtataaaatgctgtgctagacattagaaacacaaaaataaaaaatacaaggtctccttcctcagaaaacaaagaatccagtgggagagattatcaagaaaacaataacacaaaataatcatcatgagagagaaaagcacaaggtgttatataaccaaagaggaggcatattagctcaaaaacactttatttctaattaacagtcaaaataaattgttgtgtaacttaaatgtcca

SEQ ID NO: 4683 - DNA, 661 bp, Homo sapiens
  SEC23A
  misc_feature [331]..[331]: Chromosome 14, SNP identification no. = rs10134166
  misc_feature [331]..[331]: allele = a, in linkage disequilibrium with rs10135561, respectively
  misc_feature [331]..[331]: n is a, t, c or g
actaaaaaacatatgtaaccatagttcctacactaaaaatcgtccagtctcaaaataacttccctcaccaaacatactaaaagtatttagttcttaagtgaaatgttaagaaataaaagctctctcctcagctgccaccaaggttctcggttcttatgaggaagccaagaccacactggggtgagaccctcacttcatcaggtgactagcaccatgtcaggcagcaccagccctgcactcgcccacatcatggcctccatctcaagttcttctgtatctccttggacctcattctgcacgacaatgaggtgaccatcacagtggattagancaatgcccttgttaaagcagctgatataaatgttgaacctttctggcctgatttgtttgcaaaggactggccaatgtcaacatcaggagcttcatctgcaatgtaggggctggtggacctgctccaacagttggtgctgcacctgcagaaggtcctgcccccaccaccactgctgccccagctgaggaaaagaaagtggaaacaaagaaagaagaacctgaggagtatgatgatgacatggactttggtctttttgactaaacctcttttataacatgttcaataaaaaagctgaactcttaagaaaaaaaaaagaaacaagctaatatt

SEQ ID NO: 4684 - DNA, 661 bp, Homo sapiens
  PPIAP4
  misc_feature [331]..[331]: Chromosome 14, SNP identification no. = rs12587208
  misc_feature [331]..[331]: allele = a, in linkage disequilibrium with rs10135561, respectively
  misc_feature [331]..[331]: n is a, t, c or g
cagcctcccaaagtgctgggattacaagcgtgagccaccgcacctggccctttttttctttttttttttttagacggagtcttgctctgtcccccaggctggagtgcagtggcacgatctcggctcgctgcaagctccgcctcccgggttcacgccattctcctgcctcagcctcccgagtagctgggactacaggcgcccgccaccacgcttggctaatttttttgtatttttagtacaggcggggtttcaccgagttagccaggatggtctccatctcctgacctcgtgatccgccctcctcggcctcccaaagtgctgggattgcagncgtgggctttttttgcttttttaaatagggatggggtcttgctatgctgcctaggttggaattgaactcctggactcaagggatcctcccaccttggcctttcaaagtgttgggattataggtatgaactaccacacctataattttttccagtatgctggttacgaggtttcaacctgaggaagagtagaaagggaatggaattttttttaactcctgtgaaaggaaggtcagaacatctaagagattgtaaaaaatataaaatctcatataagctcccttcaaaagaaagtcttttaaaagcaaatactcctaagttcactatttcct

SEQ ID NO: 4685 - DNA, 661 bp, Homo sapiens
  PPIAP4
  misc_feature [331]..[331]: Chromosome 14, SNP identification no. = rs11622731
  misc_feature [331]..[331]: allele = a, in linkage disequilibrium with rs10135561, respectively
  misc_feature [331]..[331]: n is a, t, c or g
atctcctgacctcgtgatccgccctcctcggcctcccaaagtgctgggattgcaggcgtgggctttttttgcttttttaaatagggatggggtcttgctatgctgcctaggttggaattgaactcctggactcaagggatcctcccaccttggcctttcaaagtgttgggattataggtatgaactaccacacctataattttttccagtatgctggttacgaggtttcaacctgaggaagagtagaaagggaatggaattttttttaactcctgtgaaaggaaggtcagaacatctaagagattgtaaaaaatataaaatctcatataanctcccttcaaaagaaagtcttttaaaagcaaatactcctaagttcactatttcctcaaactggcatttcttaaaatgccagagactaaaaagagagggaaagattatgtggtcgaataaagacatgtatagccaagaacatttcttaaagatatttgaccttgcaacttttttcccagggattatcttgagtcaagtattctaaacaccctatgaaagactttgccttccaccattaaatattagttaatacgtaacagccagtaatcttcctacttcagaacccacaggtatttctaaactgaggttccagtactacagtcagtgaagt

SEQ ID NO: 4686 - DNA, 661 bp, Homo sapiens
  SIP1
  misc_feature [331]..[331]: Chromosome 14, SNP identification no. = rs10131369
  misc_feature [331]..[331]: allele = g, in linkage disequilibrium with rs10135561, respectively
  misc_feature [331]..[331]: n is a, t, c or g
tgtctcattgttatggacaatgaaagaattttcttttatttgttctttgtttctaaacaacagtgtggcaagaaattcaccagtttgaaaaaaaaaaatgaagcttataataccatttagtaaaattcagtctcattttttctttcagattggttttcctcccttgcttagtattgttagcagaatgaatcaggtaaaattaataatagagatatatgcattcttttgtttgcattgtgtgtgaaagtatttgaattgttaatacatatactgaattcttacagtatgcaagactttgtcctaagctctttaatggttcttatttaatccntactacaaccctctatggagagttattattgataactactttttatagatgaggaaacagcatttgaggttaagtaacttgcaggtggtttttcagcaagtaaatggcagtactgagattcagtgccaggtagatctaactccagagctcatgctctgtcttaatcatggtgctagagtattcatttctgtagctttcagttataagtcttagattctggggtttgaattaaatacaaggtccctgacttacaatggttcagtttaggattccttttttcccaccatgcctggctaatttttgtattttcagtagagagaggattttgtc

SEQ ID NO: 4687 - DNA, 661 bp, Homo sapiens
  misc_feature [331]..[331]: Chromosome 14, SNP identification no. = rs11624584
  misc_feature [331]..[331]: allele = a, in linkage disequilibrium with rs10135561, respectively
  misc_feature [331]..[331]: n is a, t, c or g
catttacttaattaggttaactttgtagaagtggaattgctgagttaaattatatgttttaaagttatacgtgcatttttaaaatgcaaatatgtggctgggagccgtggctcccgcctgtatcccagctctttgggaggctgaggcaggtggatcacttgagcccaggagtttgagactggcctgggcaacatagggagacccatctctattattacaaaaaaatttgcaaatattcgcttatgtggtatgcactgtaaataattttcctttttaaaattgtgctttctgcaatgcaaactttttgttatgtcattttgttactgtggtnaaaaaacatgaaatctggccctaagccaaatttctgaagccctcatataaactctacaccctgacctcgtcattgtgtacattcacaggttgaacatacccagggagaaagaaaatcccttatctcgccggtcccaggctggagtgcaagggcactatcacagttcactggagcttcaacctcccatgctcatgaaacccttcaggctcaaaaaatcatcttgcctcagcctcccaagaaactgggagtacatacttggctaactttttttttattttaagagatgagctctcgccacatttcccagactggtctcctgagctcaaccaa

SEQ ID NO: 4688 - DNA, 661 bp, Homo sapiens
  TRAPPC6B
  misc_feature [331]..[331]: Chromosome 14, SNP identification no. = rs11626002
  misc_feature [331]..[331]: allele = c, in linkage disequilibrium with rs10135561, respectively
  misc_feature [331]..[331]: n is a, t, c or g
tcccaatttacttaatcagaaactctgggtatggggccgctaatcagctttaacaaaccttctaaaaattgattttgatactcagtcccacttccttgcttaatctgtctccacagaacttctttcaccatttaatataccatacattttactattttatattgcccatgtgccccttgttcccctctctgctaaaataaagctccaaaaaggcagggatttttgtatattctgaaggctgtttgtctcccactaaggaaaccatagggcttattatttgctaaactttcttctaaggaaccatgcactctgcttatggtgctgtgactantaaatctgcgtttctagtacagactttattgggcatagacatctagtggtcccacaggaccttcgaagtatgcatattcaaatgatattcattttattaatgtcttcagcctgctctgcctccaaaatttcctaacttcattaatggcaccaccattcacctagttactccaaccagaaaacttccattttcttcacccctgtgctcccaaccccccatacactgtagtccggtggagcctatcttttacaagcttttcaaaattcatcgtctctctctacccttacttcttaagtaaagccttatcatttctctcctggtttttagcta

SEQ ID NO: 4689 - DNA, 661 bp, Homo sapiens
  PNN
  misc_feature [331]..[331]: Chromosome 14, SNP identification no. = rs1002193
  misc_feature [331]..[331]: allele = g, in linkage disequilibrium with rs10135561, respectively
  misc_feature [331]..[331]: n is a, t, c or g
gctcggcctgtaaagcagtctcaagcctgccgcagggagaagatggcggtcgccgtgagaactttgcaggaacagctggaaaaggccaaagagagtcttaagaacgtggatgagaacattcgcaagctcaccgggcgggatccgaatgacgtgaggtaagggcctaacgggaactcggaactcggagctcggagaggcagccctcaggtcggggtgaattgggggcggggagggcggccagccttaagaagactggaacctcgaggcctgttcgcggggcggcgggtaaaaccctgttgtcgccgaggtggagaggccccaggtcccctcngtagagcgctggtctcaggtccctgaggaaggagagcgaggcctgggtgcgccggcatgctttcttggcctgtgagaagacccggactgctgattcccgctctcggccctgcaggcccggaactgcagcacaaagccccttcccgctccggcggacacccggcccgttgctggccccgagaccctgccgggacgcaacaagccgccttaccccagcttcctgtccacgtgcagcctcctcggggatggcgggatggggacctgatccaggcttgttaatgtgtgggggcatcgaggtgaatataatttctgtgacacaggtcctggagaa

SEQ ID NO: 4690 - DNA, 661 bp, Homo sapiens
  PNN
  misc_feature [331]..[331]: Chromosome 14, SNP identification no. = rs2273592
  misc_feature [331]..[331]: allele = a, in linkage disequilibrium with rs10135561, respectively
  misc_feature [331]..[331]: n is a, t, c or g
ttcctgtcctgtttcagacatttagatttatttgaaactatctttttggaacttttgtgattttttctccttatgatccacatctctgaaagtatttgggtgcgactgtgtgtgtctacatatgattttgcactgatttgtaaatcttttacaggcccatccaagccagattgctggccctttctggtcctggtggaggtagaggacgtggtagtttattactgaggtaagatttcctttggactttactcatgctgaaactactggtactttactaaatatgttggtttgaacaaaacctgtgataaaatcaataacccagtgtttgtcntctttgttttgtttaatgttgtaatagactagatttctgtataaatatagttatcctgaaaaactggaggttgaagaatatattaagtttaccaattttgagtgaacttaattcttataaagtaacactataaaagcattttggaatgaatgcccgtttaaggctactttagttggaaagatttttgaaagtttaaccatattctcttgtcaaatggaaataccatttatcttgtatttcaagtgttttatgttgaacattttaaatttcaggcgtggattctcagatagtggaggaggacccccagccaaacagagagaccttgaaggg

SEQ ID NO: 4691 - DNA, 661 bp, Homo sapiens
  PNN
  misc_feature [331]..[331]: Chromosome 14, SNP identification no. = rs1050136
  misc_feature [331]..[331]: allele = t, in linkage disequilibrium with rs10135561, respectively
  misc_feature [331]..[331]: n is a, t, c or g
gaaggattttcctgtagagtctgtaaaactcactgaggtaccagtagagccagtcttgacagtacatccagagagcaagagcaaaaccaaaactaggagcagaagtagaggtcgagctagaaataaaacaagcaagagtagaagtcgaagcagtagcagtagcagttctagtagcagttcaaccagtagcagcagtggaagtagttccagcagtggaagtagtagcagtcgcagtagttccagtagcagctccagtacaagtggcagcagcagcagagatagtagcagtagcactagtagtagtagtgagagtagaagtcggagtaggggncggggacataatagagatagaaagcacagaaggagcgtggatcggaagagaagggatacttcaggactagaaagaagtcacaaatcttcaaaaggtggtagtagtagagatacaaaaggatcaaaggataagaattcccggtccgacagaaagaggtctatatcagagagtagtcgatcaggcaaaagatcttcaagaagtgaaagagaccgaaaatcagacaggaaagacaaaaggcgttaatggaagaagccaggctttcttagccattctttgcagcagaagatttcttgataaaaaaggattacctttccttgtaaagaggatgct

SEQ ID NO: 4692 - DNA, 661 bp, Homo sapiens
  PNN
  misc_feature [331]..[331]: Chromosome 14, SNP identification no. = rs13021
  misc_feature [331]..[331]: allele = g, in linkage disequilibrium with rs10135561, respectively
  misc_feature [331]..[331]: n is a, t, c or g
agaagtagaggtcgagctagaaataaaacaagcaagagtagaagtcgaagcagtagcagtagcagttctagtagcagttcaaccagtagcagcagtggaagtagttccagcagtggaagtagtagcagtcgcagtagttccagtagcagctccagtacaagtggcagcagcagcagagatagtagcagtagcactagtagtagtagtgagagtagaagtcggagtaggggccggggacataatagagatagaaagcacagaaggagcgtggatcggaagagaagggatacttcaggactagaaagaagtcacaaatcttcaaaaggtggtngtagtagagatacaaaaggatcaaaggataagaattcccggtccgacagaaagaggtctatatcagagagtagtcgatcaggcaaaagatcttcaagaagtgaaagagaccgaaaatcagacaggaaagacaaaaggcgttaatggaagaagccaggctttcttagccattctttgcagcagaagatttcttgataaaaaaggattacctttccttgtaaagaggatgctgccttaagaattgcatgttgtaaaaaatctttttggaaaatacagactgtttgtttaccagacattcttgtactttttgcataattttgtaagagttatt

SEQ ID NO: 4693 - DNA, 661 bp, Homo sapiens
  misc_feature [331]..[331]: Chromosome 14, SNP identification no. = rs10135561
  misc_feature [331]..[331]: allele = a, g
  misc_feature [331]..[331]: n is a, t, c or g
gtattaactttctgatgctttatacaagagagcacttaaattgcatccttctttgagtttaacactgtagctttagccttgactttgaatattcattttgccttcccttgacaagtaaatggttacagtgaaaatgtgaagaagtatttccagttagtttttgtgtgtatataactcacttgtgtaagtggatgtgttaaaagatctctttttaaaaatccttttattggagtaattattaaaacagtaaatgcatagagctttgcacagcaatctgtatccatgagccagttccaccactagtaccttcatctgtggcttatccagcaanatgtttcatttcctgtgtgccctggcaggaaagaggttggtaaatagtgaattaaagggatgatcataaaatttaacctggttaaaaagcaccttatttgatgacagtttgtatgcactaaaatcctttatacaaattaagttttgtctactgatttgtacctggaaaatctgaacaatattcatgttgcttacagaaaaggctagtattggcttgaagctctactataggaggggtagtaatgggggtataatgaatgcttgaggggaaagtaattttcagtaatttcagttaagcgctactgatcatagtatgtgaaaggaatttttc

SEQ ID NO: 4694 - DNA, 661 bp, Homo sapiens
  misc_feature [331]..[331]: Chromosome 14, SNP identification no. = rs10141924
  misc_feature [331]..[331]: allele = g, in linkage disequilibrium with rs10135561, respectively
  misc_feature [331]..[331]: n is a, t, c or g
agcccaggaggttgaggtgaagtagctatgatcacactactgcactccagcctgggtgacagagtgagaccctgtctaaaaaataacaaaaaaacccaaatagtgtttatggaaaacttaggagctgaaaggggatagagatggtgagttaggactgaaatcagtttagagctgtattaggaaagacaggctgggtgctatggctcacacctgtaatcccagcaatttgggaggctgagggtagaggatggatggcttgaagccaggagttcaagactgacctgggcatcagcaagaatctatctctacaaaaaatagaaaaatttagccntgtgtgtacctgtagttctagttacttcgggggctgaggtgggaggattgcttgaacccaggagtttgaggttatagtgagctttgatggcaccactgcactccatactggtgacagactgtctaaaaaaaaaattggcagagatgtctaaggggctattaaggaaacatcttttaagataccaaggtttgggtaaccaccaaaataaagatagtttgaacttcaatgagctgtatttccaatctagggtccttctacacactatctgtagaatgataacaatttacatgattactcaggtaatttgggcaaagcaaaagccaccatacc

SEQ ID NO: 4695 - DNA, 661 bp, Homo sapiens
  misc_feature [331]..[331]: Chromosome 14, SNP identification no. = rs7156264
  misc_feature [331]..[331]: allele = t, in linkage disequilibrium with rs10135561, respectively
  misc_feature [331]..[331]: n is a, t, c or g
gctcccctgccacctccaccagaacaggtgctggtatccatgtctgagagatccatagacagttcacatcacagggctctgtgcagacaactcccagtaccagcccagagctgggtagacgtgctgggtggctcgatccagaagaaagacaacaatcactgcagtctggctcacaggaagccacatccataggaaaagggaagactcaagggacaaaagaatctgaacaacagccttcagccttagaccctccctctgatagagcctatccaaatgagaaggaaccagaaaaccaactctggtaatatgacaaaaaaaggctctgtaacancccccaaataatcacagtagctcaccagcagtagaaccaaaccaagaagagatccccgatttacctgaaaaagaatacaggaggttagttattaagctaatcagggaggcaccagagaatggtgaagcccagcacaaagaaatccaaaaaacaatacaagaagtgaagagagaaatattcaggaaaatagatagcataaagaaaaaacaatcaaaacttcaggaaacactggacacacttatagaaatgcaaaatgctctggaaagtctcagcagtagaattgaacaagtagaagaaagaaattcagagctcgaagacaaggtctaacaa

SEQ ID NO: 4696 - DNA, 661 bp, Homo sapiens
  YTHDF2P
  misc_feature [331]..[331]: Chromosome 14, SNP identification no. = rs7140164
  misc_feature [331]..[331]: allele = g, in linkage disequilibrium with rs10135561, respectively
  misc_feature [331]..[331]: n is a, t, c or g
tgcagaaatgaaatctgctgtggactacaacacatgtgcaggtgtgtggtcccaggacaaatggaagggtcgttttgatgtcaggtggatttttgtgaaggacattcccaatagccaactgcgacacattcgcctagagaacaatgagaataaaccagtgaccaactctagggacactcaggaagtgcctctggaaaaggctaagcaggtgttgaaaattatagccagctacaagcacaccacttccatttttgatgacttctcacactatgggaaacgccaagaggaagaagaaagtgttaaaaaggaacgtcaaggtcatgggaaatanaaggcagttctacacagactgcagcaacggttgcatctgcatatcctaagaggaaaaaatgaccttcaagagaattaggacttttttcttaatttcactgacttcagcgacgattgcagacttgcagtttaagtattggaatttcacaaaagacataggacttaactggaaaatgaaaaaagaaaaaagaaaaagaaaaaactaaacaaaaaatccctctaggtagtttaggtgaaaaatgtcccttttattttggctttggttgtgatttcagagcataatgctttgtttttttgtctttttactatgtttttcagatttttaagtccg

SEQ ID NO: 4697 - DNA, 661 bp, Homo sapiens
  misc_feature [331]..[331]: Chromosome 14, SNP identification no. = rs1481404
  misc_feature [331]..[331]: allele = a, in linkage disequilibrium with rs2623142, respectively
  misc_feature [331]..[331]: n is a, t, c or g
ccatacaatttctggactttttccttcagtcaaaaataaccttcttttagttttgtcattatatattttgcttattgtgagttcataagcaccactaaattgcatagtgatacatatttgagtcatcactactctttgatcaatatttttttccaataactggatcttaagccagtctggattgtaataattatcccccactcatattcctaatgtgtttttacatccaggtagatatttacaatctgccaactcctagtttgcttgtaagtttacactttattggagatatcttgccaaataattgtgctttttaaataactttaatacnttatcaagtccagtgtctaggtaattttatgaacgttgtcagctaatacaacgtcacataactaagcttgttttctcttatgatgtaaataatatgcaatcctcatatgtcactagaagcagttaatttttttttctaagtacttgtcataaaggtttttttagtttttgtttttattttttttaaaaatagataatgggaatgggagtaagtttaagtaaagggtaaccagctccctgggcttcatctaagtctaccttgcccaaatatttactggttgctgcttccaataaccatctttattggatttaatgatttattttactgtta

SEQ ID NO: 4698 - DNA, 661 bp, Homo sapiens
  misc_feature [331]..[331]: Chromosome 14, SNP identification no. = rs2819810
  misc_feature [331]..[331]: allele = g, in linkage disequilibrium with rs2623142, respectively
  misc_feature [331]..[331]: n is a, t, c or g
atactgtcattatttacttcataaggggaaaaacccatatgtatttcttcttcaaaataccattcctttcataaagttctctgctagatgctaacatttcatcacaaggcaatgaggccataagaaactgtacaatggagtttgtacaaatgcacaaaactgtacaagtggagtcaaatcagaaacacaggtgaagcagaaatattcctctttgtccagtctctcattagaggcatgaaaaaacatcatttgtttactaatgaggtacaagcctcagaattgatcatttattaatgattaacatggcattcctgtatatactcaatgaaanagtgtctttttttaacaggaaagtatatggaagatggcatttaaaatatcagggcaatgatttctgctttatgatttcattcagaatctttcagagaggaggtgtaatgaggtcagagattaacagcattttaaaaaataatgcttgtaattttgggaggaagttcaaactgaaaaaaaaaaagattaaaaagaccaatagttgtttaataaattgccagcatgtttacatgcaaggaacaaagcaaaacaacacagcacacttgctatattaatttcttgcaaacttggaaatatgtgtacttccatatctttctccctctttcacata

SEQ ID NO: 4699 - DNA, 661 bp, Homo sapiens
  misc_feature [331]..[331]: Chromosome 14, SNP identification no. = rs2623122
  misc_feature [331]..[331]: allele = t, in linkage disequilibrium with rs2623142, respectively
  misc_feature [331]..[331]: n is a, t, c or g
ttgagattttaaaagtatatgtatttcagacatggaattacattgttacttgattgatgtgagaatgttaattgaaggctagaaacaaaattgttctataagtgaaaatggatgggactgactgaagccagggagctgctttgggggaagaattctaggtaaaaggcagaatcctgtgaatagcagcagatggagaatttggaagcctcaggagggctgccttatgggaagcgttgctctagaatgttcccaacgctaggaatttaagttatgcctgataaaatctgagagggatttcagatttcaacctaaaccttattctgggaatctnctccatcagtgcagaatccttggagactgcaaatgtcaattaaatttctgaagatcctccaaactgataataaaataaggagaccgaaaaccaaaattttaatatctttatattatactttgatgtattttataggtatttcataaaccagtaaatgtattcaaatgttcagcaggaatcataacagaaaacaatctaaaagtagttctcctatactatggtgaaatcattataagtgtacatttcccttagaaacttcattacaaatgcatttagagtgagtttctgagaaactcatgccacattatagcaagttatatttcagccctt

SEQ ID NO: 4700 - DNA, 661 bp, Homo sapiens
  misc_feature [331]..[331]: Chromosome 14, SNP identification no. = rs2623143
  misc_feature [331]..[331]: allele = g, in linkage disequilibrium with rs2623142, respectively
  misc_feature [331]..[331]: n is a, t, c or g
ataggctgtttgaagtgagccttataaatcacctgaactgctccactattggcatgtcttggagtcattacgtataattggttaatggtgtatttattctcacattactggatcagctccagggataatcactgatgagtttcaaaactccaggaggatttctatgcagaggtaaatgaattaaaacacaagataaaactaattacttttatttaaattcaattttgggagtaattgttctgtcttgggggttttctagcagttttcagaagtgataaatttgctttagtttgctaagttgcatttccttagagctaagggattaaatcantgggatgaatattagaaaggaagtaaattaaattttgtggtagaatttcccaccttagttcttcatgctctttttgatgcttctcttaaccaggcatttgaaaacctgataaatgagaaaaaaagaaccactttcaatgccaaaattaagtgcacattactgaaaggtgttaggagttccagaaattaaacaccataatcaaaaagactcatatgtactttgctgaaagcatctataggcctggacaagactcagagagcatgagtcatgtagagctataattttcatgtaaagcaactggatgtagttaaataataaaaatttaagttt

SEQ ID NO: 4701 - DNA, 661 bp, Homo sapiens
  misc_feature [331]..[331]: Chromosome 14, SNP identification no. = rs2819809
  misc_feature [331]..[331]: allele = g, in linkage disequilibrium with rs2623142, respectively
  misc_feature [331]..[331]: n is a, t, c or g
gttttacaaatgtgtgcaaaaatttcctcccagtctttgtctatatctatacttactttgaatgtcacaagcaaatgagctgacaccatcattgcaaagtgtcatgcaaagtaagagagctacagtgaaaagggagctgtatactcttcatgacccagtataaatagtgaaaattccttctgaattgattgcaaccttgaatcagcatgttttcattctagtgtcctccaggtatggagagccaatgaacttttacattgtctagctaacccagctctataaaatgatgagcatcaataataattttctcaatgacttattagagccatancattcaaggagtcaggtcccaaagtgcagaaatagtaaagaagggataggttgctaattaggcctttgtaagtgcaagagttaaaggtgttttagaaggacacaccatgaatagttagatatataaaacagaaagagatgagtgtttaaaaagaaacttcatgcatttcctaatttaatataacatcaatatttatgcacagacatatttccaccatgaaaaaaactctaaatgcatgccaactcttaaatttcagcctcagattgtcaaccactagcttaatcagagcaaaacaggattttttttttttagacattcggggcagatcct

SEQ ID NO: 4702 - DNA, 661 bp, Homo sapiens
  misc_feature [331]..[331]: Chromosome 14, SNP identification no. = rs2623129
  misc_feature [331]..[331]: allele = t, in linkage disequilibrium with rs2623142, respectively
  misc_feature [331]..[331]: n is a, t, c or g
ttgatttaattattttacattatattcataaatcataatacttgtactttatatatttataaaattttaaattgtctattatatacgtgtaagtgaaaaaaaatccaagagccaatgaaccaaaatcatctggcacttaagaggagatgggaagcagagtaatgatagaaaaatatgccttatacaaaattaatgagagcacacattagagtgatgtaatttagttgaaagtgtggtgagataaggatgttgaagaattcctatcttatgattcttaattgtgtaggggaagtaagggagtgttcagcaacagaatgaagaggtaggaggnaaggtagttgtcctaataacagcccatagttcaagtgtattgcagtgtgacgactatatttattattgctgaacttcgtaagattttgagattgtatcaatattgctatgtatactggattctttatgcttgcaaaatattataaaatgtgagagtactgcaaaccatgtccattccaaagagaaccgatcaaaaaggaaaagatacacatataaaataatagctataaaatgggttagctgagaatgatttaatatcggtactaattgttcagttaagacaataaatgcaaaagaatcctaacagaagagtttatagggtgctgatggt

SEQ ID NO: 4703 - DNA, 661 bp, Homo sapiens
  misc_feature [331]..[331]: Chromosome 14, SNP identification no. = rs1958063
  misc_feature [331]..[331]: allele = c, in linkage disequilibrium with rs2623142, respectively
  misc_feature [331]..[331]: n is a, t, c or g
agatgagacgttggaatgtggacttttgggttactgctgaaatgagttaagactgggggactactgggaaggcatgcttgattttgaaatgtgaggacatgagatttggagaggccggggggaatgatatggtttgactatgtccccaccaaatctcaactagaattgtgtctcttggaatttccatgtcttgtgggagggacccagtgggaggtaattgaatcttgggagctggtctttcccatgctattgtgatagtgaataagtctcacaagatctgatgggcttatcaggggtttccacttttgctttttcctcattctctcttgtngccaccatgtaagaagtgccttttgcccttcaccatgattatgagacctacccagccatgtggaactgtaagtcaaattaaaccaccttttcttccaagtcttgggtatgtctttatcagcagcttgaaaatgaactaatacattacatagtatattactttgtcaaaatagagaaataaaaatgttcaaacattgttttaggttagaaaatacaaataccttggaattagagagccatgttaggaagcaattgacacttgcattataataatctaggccaaagatcacctttccatactagaaaatggaaactgtaaagtgagaatgga

SEQ ID NO: 4704 - DNA, 661 bp, Homo sapiens
  misc_feature [331]..[331]: Chromosome 14, SNP identification no. = rs2623142
  misc_feature [331]..[331]: allele = t, c
  misc_feature [331]..[331]: n is a, t, c or g
tggctgtggaagcacctacactgctccagagcaggcactccaatctccggctcaagcctaaagtgcctacatagccaaactgccaggtcactaaagactgactgactttgtatgtgcccagattaaaaatggcctctgggtcttggtcccaggtctgggaaaatgcctgcaagttttcctgatttcttcccttctcagaatctccaagcctctccccaagttagctccattgcttgggagaaagaaagtgttctcccttgctctgtgactcacctctatccctctgcgactaacttttccactggggttgctcagatccccactgaagagntgagttgcagagggaggctctctgcctctctcatgtactagagcttcactgacttgtatcagctagatatatcacaggagctctttgctcacattctcctccccagaatcaggggatgtcctttacaattgcagtggattctccttttccttctagaatgacagttcacaaagttgactttcattcactatcttgctgtttccaagtagctgaagcatgctaaaagcctctaatccactatcttggaaacaaaacaacagaacaaaaacaaacaaacaaacaaacaaacccttagttcctattaaaagcagaaattattccattcaacca

SEQ ID NO: 4705 - DNA, 661 bp, Homo sapiens
  misc_feature [331]..[331]: Chromosome 14, SNP identification no. = rs2623135
  misc_feature [331]..[331]: allele = g, in linkage disequilibrium with rs2623142, respectively
  misc_feature [331]..[331]: n is a, t, c or g
taggctctcagggttttggccacagattgagagtcatgccattgggtttcccgggctttcacacttggactgagccacactaacagcattctaggtctccagcttgcagacagcctgttataggacctttcaacttccataatcatatgaatcaatttccctaataaatgccctctcatctgtctatctacatctaactatcttattggttctgtcactctagagaaccctgactaatacaattaccatttaagttggtggattcagtaaagtaaatggcccttcccaatgtgattgggtatcatctaatctgttgagaggttgagtagancaaaaacgtgaaggaagtttgaattcactctctgcctgacagattgagccgggatgttgatattctgctctcagtgttccctgtcccagtcctgcagactcagtatggaatctatatgactctgtggctctcaagacttagaatacactaccagctttcctgggtatccagtttgtagatcagattgtgagacttctcagtctccgtaactgcatgagccattctcttataatatgtctcactctatatatctatatctatattattgatatctatactatggattttttttaactctgactaatacctaggtttgagaactagtgctct

SEQ ID NO: 4706 - DNA, 661 bp, Homo sapiens
  misc_feature [331]..[331]: Chromosome 14, SNP identification no. = rs2819825
  misc_feature [331]..[331]: allele = g, in linkage disequilibrium with rs2623142, respectively
  misc_feature [331]..[331]: n is a, t, c or g
aaacctctttgaactcagtccttttggggttttatggacactcattaagtgggcacagtggattaaatcattggtcattcgtttgtttgttcaaacttcagccctctttccctcccaggaatttggggatttaactgatagttccaaccctctaatcacacggttggttcccctggcagacagcccccactatgaggtcatctaggggctccctgcccccagtcatctcattagcatacaaaagacccccatcactccagagagtctaagcatttttaggaactatatgccaggaaatggagatgaagaccaaatatatatttcacaatantgcattggtaaaacaagtaaaacttatttcctgggacatcagaaaacataattggtaacttgaatgaagttagcatacaattttgaacagtccagcatcagtcataagtaagtcatatgatacactcttgtttagggataaagcactgtgtaagtggatttttgaaaatacaatcacatcttccttttactgaaattctactttttacatatttacttttattccagatgatattcatcactgtgtgccagatgaataataaacagtgttaaaaagtaaactgagacacaataaaatgctaaggagtttatttgagtaagaagcaattca

SEQ ID NO: 4707 - DNA, 661 bp, Homo sapiens
  misc_feature [331]..[331]: Chromosome 14, SNP identification no. = rs2819824
  misc_feature [331]..[331]: allele = g, in linkage disequilibrium with rs2623142, respectively
  misc_feature [331]..[331]: n is a, t, c or g
gtgaactatggtcagaagctaggagtggagtcacttggtttttctgaagaagatatttgggtctatgactaaatttccagtaacaaaagttttaaggtcaatactgaaccttataaaatacatggaacttctttgggactgctttagtaaaaaagaaaaaaaaaatcttctttacttgcttaggaaactttcttacacctaaccaagaagattttttgttctttttttaaagagaccatactcaccttcccagtattgttccaattttagtatatgtgctatcgaagcgagcacagaagactttcttaagattccagatgccagaacacanagaagtcaattcaaaaatgtacatttaaatagataaaaattgtgagtccttggttaatttcagacccttctattatgaggagattctgctttggcatacagtaactagagctgttgctttatagggtagtcattttttttttttcttttttctttttttttttttttttttgagatggagcctgattctgtcacccaggctggagtgcagtggcgcaatctcggctcactgcaacctctgcctcccgggttcaagcgattctcctgcctcagcctcctcagtagctgggattacaggcgtgtgccaccacatccagctaattttttgtat

SEQ ID NO: 4708 - DNA, 661 bp, Homo sapiens
  misc_feature [331]..[331]: Chromosome 14, SNP identification no. = rs2819822
  misc_feature [331]..[331]: allele = g, in linkage disequilibrium with rs2623142, respectively
  misc_feature [331]..[331]: n is a, t, c or g
gattgtcagtgttacagctcctttaagataaggtttgtttttgcctaagttggttgatgagccaggtggcatggtaaaatgtgcatacaaggaattttacatgaccgaaaaacaaaatatattataaaaggcctattgattgaaactcataataattccccaggtgagaaagaatggatctcctttacacacacacacacacacacacacacacacacacacacagagagagagagagagagagatagagagagacacacacctggagttggaacaaagattgttgtgggaatcagtgaagattggtattctagttaggttattgttgtantaggggaacgaagttacatctaacttgagtaagatgatggaggttagtaagaaaaagttattgaatgtgtatgtgagcaaataaagaaaacaactataattagaaactaggaagctgttacagccaattgtcatcgaggattggatgtagtttgggaaaatgaatgaattcatgtaattctaggaacattgtcaaaagaaattaaggatcttcacttcagggctcatcaagaatgtgattctgcccttcatcctcagtaccaaaatgtgtgttaggattttccagagaacaaaacaaataggatatgtgtgtgtttacatgtgtgtaagt

SEQ ID NO: 4709 - DNA, 661 bp, Homo sapiens
  misc_feature [331]..[331]: Chromosome 14, SNP identification no. = rs2819820
  misc_feature [331]..[331]: allele = a, in linkage disequilibrium with rs2623142, respectively
  misc_feature [331]..[331]: n is a, t, c or g
gttatttgggtttgaatatatatatatataaataaaacaaagttagttattggtctttgcctatgttttcaataaaatcaatggcatgtgaaataggtttagaaagcatacttggcagtctaagcccaaataagaggaataaagtagttgtagaaacactttttaaacaaaattgcctaaaaggtcatctgacatttgaggaagtggtatctaaaagagagagtgcagtctgaatcatgagttactggactagaagctatgtcaagtttaagcaggatgatagataaaggaaagagttgatgctttatttcctgacatttgcttcataggntcagcattttttagttgttacttttctttaacttctttatcattgtttcatttttctactgaggaactaggtgaaaactatattttagcaaataaatcttttcaaactcttgctctgtcatatgacactcatcttcccaggtcttccccagaaaaaaaaatgttagcatacattaattccaagtataagccaactgcctttactcagggtggatatggaacttgtattagtctgttttcacactgctgataaagacacacccaagactgggcaatttacaaaggaaagaggtttaatgtagaactcacagttccacatggctggggaagc

SEQ ID NO: 4710 - DNA, 661 bp, Homo sapiens
  misc_feature [331]..[331]: Chromosome 14, SNP identification no. = rs2819817
  misc_feature [331]..[331]: allele = c, in linkage disequilibrium with rs2623142, respectively
  misc_feature [331]..[331]: n is a, t, c or g
atttccattgcatgtatttaccacattttctttattcatgcatctgtcaatggacagttaggttgcctacaccttttgactattagtaattttggtgctgtgaacatgagtacacagacccatgtttcagatctattccagatcttcattcagttcttgtaagtatatacccaaaagtgaaattggaaaatcccatgataattctattttcagttttctgaggaaacacgatgctatttttcatagtggctacaccattttatattaccattaacaatgcacaaaaatttcaacatcttcgctttcttgccaacatttgttattttatttntttgacagtagccatcctaatgggtgcgaggtggtatctcattgtggctttgatttgtattttctaattattagtgacattgagcttatttttgtgtccttgttggacatttgtgtatgttcattaaatcagtgtctattcaagctctttgtccattttttaatcaaagttttgttgttttttctttgtcttatttttgtttttattgttgagttacaggagttatttatacattctgaatgttaatccctcattagatatacgatttgcaaatattttccctcatttcataggtttcctttttgctcaggaaggctataattgtgcctt

SEQ ID NO: 4711 - DNA, 661 bp, Homo sapiens
  misc_feature [331]..[331]: Chromosome 14, SNP identification no. = rs1481415
  misc_feature [331]..[331]: allele = t, in linkage disequilibrium with rs2623142, respectively
  misc_feature [331]..[331]: n is a, t, c or g
ccttgttattggggttaataaatgaatgttatgttttgtaggctgtagtgcaccaggaatatacagtgatattaatgccttaattgttgacattaaagtatcactaactgcattctaattatagatattcatatttctgctaaaagtagcaagtgcctaaaaatgtgtaatataggactttattttgctagagctgccaaaatacaccctagactggatgatttaacagaaaatattttctcacagtcctaggagctagaagtctgaaatcaaggtgttggcaggactgatttaattttgagacctctcttcttggcttgtagatgactgncttttccctttgtctttacatggtcttgtctgactttgtttaaggacaccatttacagggactggataaggtcccaccctaatgatctcatttaacattaattacccctttaaagatcttatctccaaatacacttacattctgagatattggtggggggtggctagggccttagcatatgaatttaggggagaaactattcagcaaacaacactgtataataatgtttcccaaattatagtctgctgagcacttgtatccagatgtactttagtaacagattatactggtgaaacacattgggagaatgctaagtgatataccaaaaag

SEQ ID NO: 4712 - DNA, 661 bp, Homo sapiens
  misc_feature [331]..[331]: Chromosome 14, SNP identification no. = rs2623121
  misc_feature [331]..[331]: allele = g, in linkage disequilibrium with rs2623142, respectively
  misc_feature [331]..[331]: n is a, t, c or g
ttcctacatgagaaatacgttgcccagtgtcaggcatgtcctgataggaccaaaacagtgcatgtcatatgggtgaccttttcctaatattgcacaaagaaatcaggctgagagaggttaataatgtactctcaagcacatggctgggtaagtaccaggataaggcttaagcttccatctcttagctcctcctcacagacttttggcctcatcttgcagtatatcaagcttttactataactgactgcttctcctgctgcatggccatcatcttcctcttgttagatgctcatcaagaaaagttatgcagttagtacaggaccaagaaaanagaaactaaaaaagaatagaataaagccattgatgctgatcaggctctgacaagtcttcctacatcccatctttgctcatggcatatggaatgaaaataatgcaaagtggggtgaagctcaaggtgttttctaaggaactggaattttgtcagagcatgaaagaatgtatggttactcaattttggtggtgcttcagtgaatttaaatagaccatgcccaagattacataagtgagctatcaataaagagacacattttctgattatgtaagtaatttatgacccttgagcaaaatttgaaaaatgtaaaaatatttcaaaagaaaacaa

SEQ ID NO: 4713 - DNA, 661 bp, Homo sapiens
  misc_feature [331]..[331]: Chromosome 14, SNP identification no. = rs2765921
  misc_feature [331]..[331]: allele = c, in linkage disequilibrium with rs2623142, respectively
  misc_feature [331]..[331]: n is a, t, c or g
tgataaaaactctcaacaaattaggtgtagaagaatctcaacagaataaaaggggctgtagatgacaagaccacatgcccgaaggaaaaaactgaaagcttttctctaagataagaaataagacaagaatgcctattctagatacttctattcagtctagtattggaagtcctatccagagcaattaggcaaaacaaataaataaaaggcatctacactgaaaaggaagaaattaaattgttcctgacatgtaatgtggatgacatgatcatatatatatatatgtgtttgtgtgtgtgtgtatccctaaagacttcacacaccaaaacgnaggactaacaaattcagtaaagttggaggatacaaaatcaccatacaaaaattagattttttattacacagatatattaatcacattccatgtctccgatcatgttcagtaatgtttctttacactaacaacaaataatcagaaaaataaatgaagaaaacaatttcatttacaatagcatcaacaaaataaaatacttaggcataattttaaataaggaagtgatcattatgtttattttataatggaaaatctagacactttctccccatgtccattactaaaagtgcaaataatttgcaggcaatattattaactataagttttaaa

SEQ ID NO: 4714 - DNA, 661 bp, Homo sapiens
  misc_feature [331]..[331]: Chromosome 14, SNP identification no. = rs12435750
  misc_feature [331]..[331]: allele = t, in linkage disequilibrium with rs6574840, respectively
  misc_feature [331]..[331]: n is a, t, c or g
agtcatttaagtttccatttatacagagagaaatgacagaataacgggccataacacagtggtaagagagagctaatgtagtacttatatatgcttgtgcataaaagagaggtataaaaaaaattggactggggtttgagccaagaaatgagaggtgatagaaatttttacctcattgttttcagtgctgatgtcagattccctttctgccagaatagcttaaagggaatgatacgattttcacattgaatcttttcagcagctccacctggttttcttgccgattgtcaggctcaaaccccaaacgtcacactcaaccacctgttaaacngcatttgtcaaacctgtaggaaaggtatgctagcagagcattatcacagcagaatattttcatttttttctatttcaaaactgtttttatgtgacactcaaagtctggaggagaagcgtaaaacccagttcaaaatatttgatttctttttttcctccatagaaggcaaaagagataggttctagttaggtactcacctatatctccaaagaaactaatgaatcgaatagcttatttttgcatatgctgatgtttggccagatcttgtggcttatccatgatagactgtctttattatttaatataattttctctgtaacatagcaagaa

SEQ ID NO: 4715 - DNA, 661 bp, Homo sapiens
  misc_feature [331]..[331]: Chromosome 14, SNP identification no. = rs2638806
  misc_feature [331]..[331]: allele = c, in linkage disequilibrium with rs6574840, respectively
  misc_feature [331]..[331]: n is a, t, c or g
ttagtagtggccacccccccaatgttgtgataactaaaaataaaccccataaatattcaaaatgcacactggagggtggcatctcccttgctgatagccagcaatttaaggctctgcatatagaggtacctaaagcaaatttcacagcttgaatggtataattatgtaagccaataaatttcttttttggttttttttttttgacaatatgcattagagtgatgatgtattttttaacaataaagatcatttttattaaaataaagcaaaataagtttgcatttttccttctgtgccatttcccaccattattattctaagaaaacatacnaacaatagcaactatgcatgagtaatgtggaatatttctttcaatttcactacaaaatgtatggattttaataagactgttatatagcatctatcttagaagcaaaatctgaatcaaccatgtgtatcaagcaatctgactatgtattaggcaaatacagtcagaaacttgcattctggttacaaaaaaaatatgagtctcaacagaaattctttttccatgtttcagcaaaatatttaaggagttttttgtagtatgccaaataggagtgctgagataaagttaggttcgtcctataaaatgctatctctaatttatatggcctatgta

SEQ ID NO: 4716 - DNA, 661 bp, Homo sapiens
  misc_feature [331]..[331]: Chromosome 14, SNP identification no. = rs2753634
  misc_feature [331]..[331]: allele = a, in linkage disequilibrium with rs6574840, respectively
  misc_feature [331]..[331]: n is a, t, c or g
agttgaattaagattttcatcttatttcttggtcctcataatgataagctggtagaggctatgttttagaatttagactagctccatataagcctaaagacattttgaatgggaaaatactaggttttgaattgattttatcttaaatcacttaaatacatcagaatgataaaaaaattttacaaattcactatctggggaatcataatgtttaagagaatattcctcgaattttaaggatttggattgaattggagctctaagaattaatgaatatatgacttcaggcaaattaagttttttttaaattacttttttcaccatcagcaangatatcacttcagctattgacagttttgggtttttaatttttgcaagcactgaaaaaaaattaaaatggaaatttatatgaattattttaggaggttatttcctgtcatcagagagataaattaataatttgatgaggaatatgatgtctgagataggtctttctgaaagtcttgacactatcaatgtgttaagtttactctaaagaaatcaacactttttagacaaaagtattacatcactatcaaatgactatagggctcctatattgatttggtttcattttgctatccaggacccagaaccttgatggggaaaagaaacagagata

SEQ ID NO: 4717 - DNA, 661 bp, Homo sapiens
  misc_feature [331]..[331]: Chromosome 14, SNP identification no. = rs2753632
  misc_feature [331]..[331]: allele = t, in linkage disequilibrium with rs6574840, respectively
  misc_feature [331]..[331]: n is a, t, c or g
tagatataaagtattggctcaaatatcctacagtaattatgtaacaagagcctatagaaaaaaaatgcaatcaattttcacattcacatttagagagaagataatggacaaactattcttcctaagttttgatccaagcaagctctgctctcttgaagtcgcctatttttcctgtttcaactacactgtttttctgatattcctggctgttagacttaatttttaaatataatttctaagttacctgctatcaagtttctttcttttgatcatcttaactctcaacagttgttctttatacatgaaatctataactttttgaatgcatgcnaaactcgtgatttcactctatttccgttccattattttatatggtttccaaaactccattcatgttagtaactgtttcctgagcattcaggtaggtttgttgcaggccagctcacagaccaatatccaaggtgtaatgagaaaaagtggccctggatcttgtgagtggtgcccagatcatgagtcagtgctcatattgatatgatgagaaaagtgtgcattttctacctttttctgaggtgacacctgtctcaccaaaagctaagtcaaagccgggtccaagctcaggtaagtttttgtttgtttgttcgttttcctagttccagttacc

SEQ ID NO: 4718 - DNA, 661 bp, Homo sapiens
  misc_feature [331]..[331]: Chromosome 14, SNP identification no. = rs12588930
  misc_feature [331]..[331]: allele = c, in linkage disequilibrium with rs6574840, respectively
  misc_feature [331]..[331]: n is a, t, c or g
gccaggaatatcagaaaaacagtgtagttgaaacaggaaaaataggcgacttcaagagagcagagcttgcttggatcaaaacttaggaagaatagtttgtccattatcttctctctaaatgtgaatgtgaaaattgattgcattttttttctataggctcttgttacataattactgtaggatatttgagccaatactttatatctaaaaattgatataaggatacagtttttaaaaaatgtatgcactcagacacatgtagaagtatctttatttcagtattgcttttttagtagttaataatattgtcattcaattttggtgcatccanatatctaacaatggactattgtgaatactataaattcaccaggacagatacgatcgataaatttttattgatgtggaaatattctcatcatttacaaaaaatacaggttaaaaaataaaaatcgtttctatatatttttgcttatctgtaacatatttttccactacttatatatatataagtggtgtgtgtgtgtgtgtgtgtgtgtaaatgaacactagttaaagtactgccctaagcatttgttaaacatccactagaagctgaattggagaatatcgtttcaagaaatgttgcaattataactgggtgtagaaggattagcaatat

SEQ ID NO: 4719 - DNA, 661 bp, Homo sapiens
  misc_feature [331]..[331]: Chromosome 14, SNP identification no. = rs12887050
  misc_feature [331]..[331]: allele = a, in linkage disequilibrium with rs6574840, respectively
  misc_feature [331]..[331]: n is a, t, c or g
gctctgttgcccaggctggagtgcagtggcatgatcttggctcactgcaacctctacttcctgggttcaagccattctcctgcctcagcctccccagtagttgggattataggtgcccaccaccacacctggctagtttttgtattttagtagagatgaagtttcaccacgttggccaggctagtctcgaactcctgaccccaagtgatccacctgcctaggtctcccaaagtgttgggattataggcgtgagccaccgtgcccagccttgtatatttttttcctagttagattacttactatgggagtttctggattaaccattcttacnagtgggatctccttcacaggcacaaaaaaaggttctattacatatcctcttcctcaaaactaaaaagagttaagaccttaaaaagtgtgagatcaaaagcttttttttttgtctgtttgactgagttttataagaagcattaaatttaaagaaattgagagtcttatagatgacaagaaaataatccatgggttggatttttctcacaatgtggagatcaacttcaagaggagatgtattaagtaaaatctgatttaggattaaaattaagatttaagtaaagctagtaaatatgttttacacacacccacacccacacaatgcattagc

SEQ ID NO: 4720 - DNA, 661 bp, Homo sapiens
  misc_feature [331]..[331]: Chromosome 14, SNP identification no. = rs12888694
  misc_feature [331]..[331]: allele = t, in linkage disequilibrium with rs6574840, respectively
  misc_feature [331]..[331]: n is a, t, c or g
accacgttggccaggctagtctcgaactcctgaccccaagtgatccacctgcctaggtctcccaaagtgttgggattataggcgtgagccaccgtgcccagccttgtatatttttttcctagttagattacttactatgggagtttctggattaaccattcttacaagtgggatctccttcacaggcacaaaaaaaggttctattacatatcctcttcctcaaaactaaaaagagttaagaccttaaaaagtgtgagatcaaaagcttttttttttgtctgtttgactgagttttataagaagcattaaatttaaagaaattgagagtctnatagatgacaagaaaataatccatgggttggatttttctcacaatgtggagatcaacttcaagaggagatgtattaagtaaaatctgatttaggattaaaattaagatttaagtaaagctagtaaatatgttttacacacacccacacccacacaatgcattagcatttttatgtaattttctgtaaaggggccattcataggtttactgagtaatactggtatgatcatttatgtacacattgttgtatagatgtatgttttcatttttcttggatatatatttaggagtgtaatttctagatcatataataattctatatataacttc

SEQ ID NO: 4721 - DNA, 661 bp, Homo sapiens
  misc_feature [331]..[331]: Chromosome 14, SNP identification no. = rs11848342
  misc_feature [331]..[331]: allele = t, in linkage disequilibrium with rs6574840, respectively
  misc_feature [331]..[331]: n is a, t, c or g
gtcgggagttcaagaccagcctggccaacatggtgaaaccctgtctctactaaaaatacaaaaatcagctgggcctagtggtgggtgcctgtaatcccagctacttgggaggctaaggtaggagaatttcttgaatctgggaggtggaggttgcagtgaaccaagatcttgccactgcactccagcctgggtgacagagtgagactctgtctaaaaaaaaaaaaaagaaaaaaaaatcaaatgtgccacctctgttaactatgcaaatcctaaccattgaaaagaaagtgttttattactaattgacaactataatttatgggctagtgantattttatcttctttgaagttagaaatgctatagtatcagtcagagatactctttatatcttctcactgaacactttgatcaaatttaacagcatgaagagctttcctgtgtggttgtgtgtgtgtgtgttagtatgtatgaactaacaatgtgttaactttctttattagtacataatagtggagtcatgtctaaagtgaattaagttctacaatcagtgaagacgttgaaaaaaaggaaaaattaacctgttaaattgtctaggcataacttattggaatttcagcatccaagattggttgattgatcgattttttagcttgcattta

SEQ ID NO: 4722 - DNA, 661 bp, Homo sapiens
  misc_feature [331]..[331]: Chromosome 14, SNP identification no. = rs11159719
  misc_feature [331]..[331]: allele = c, in linkage disequilibrium with rs6574840, respectively
  misc_feature [331]..[331]: n is a, t, c or g
gttagccaatgtgttagtcaaggtcttataacaaatagatgccaagactagaataaacactcaagacatttgttaaggatatcacctgtaagtaaataaaaagagggagccagggcagggaaggaaggctgtcagaccatgatggacgtgtcaccattagtaaaggaggagatagaatgaaagcatcttagtctgaagtgcagttcccagaaaaagtaaacaagattgtcgggcaggtctcaagccaagcttgctcctgagaggaatactgtgtttcacaggaatggccccagtgtgtattgtaggaatggccccatcttggtgtctctantgtgttcagtcactggctaggagcagcctgaggaatcataggcttggtgcctggtattgaattttttagtacagcagctggatccccccatagctagggatctgaaaatgcaccgtcatggtcaacacaggtgtacaatgcaccccaaaaagaataatttccatttagatcatgttttggggcttgcaatggcttagaaatatggaagaggctaggcatggtggctcatgcttgtaatcccagaattctgggaggccaaagcgggtagatcacccgaggtcaggagtttgagaccagcctgaccaatatagtgaagcctcatccctacta

SEQ ID NO: 4723 - DNA, 661 bp, Homo sapiens
  misc_feature [331]..[331]: Chromosome 14, SNP identification no. = rs12879794
  misc_feature [331]..[331]: allele = g, in linkage disequilibrium with rs6574840, respectively
  misc_feature [331]..[331]: n is a, t, c or g
tagatcatgttttggggcttgcaatggcttagaaatatggaagaggctaggcatggtggctcatgcttgtaatcccagaattctgggaggccaaagcgggtagatcacccgaggtcaggagtttgagaccagcctgaccaatatagtgaagcctcatccctactaaaaatgcaaaaattagccagacatggtgacatgtgcctgtaatctcagctacttgggaggctgagacaggataattgcttgaacctgggaggtggaggttgcagtgagcggagattgcaccactgcactccagcctgggtgacaaaaaaaaaaaaaaaaattcccntagtgacagtttttgttttacctctagaaaataaacttccgattgaaataattaaaatagacatttttcatatcacaatacttctgagtaatgaagtcctcagggtcttcctgagacagaagagcaagctttgatgcaactgtttcaaggtgattgtcccctttgacatttccaacagaggtatacctaagttccagctcctacgcaccttcagcaacacttggtaatgccagacttaaattttagccagcctcataggtgtatagttgtaactcatagatcatgcctttgatgtcgtatccaagaattctttcccttaccctaagtgac

SEQ ID NO: 4724 - DNA, 661 bp, Homo sapiens
  misc_feature [331]..[331]: Chromosome 14, SNP identification no. = rs12434801
  misc_feature [331]..[331]: allele = c, in linkage disequilibrium with rs6574840, respectively
  misc_feature [331]..[331]: n is a, t, c or g
gagtaatgaagtcctcagggtcttcctgagacagaagagcaagctttgatgcaactgtttcaaggtgattgtcccctttgacatttccaacagaggtatacctaagttccagctcctacgcaccttcagcaacacttggtaatgccagacttaaattttagccagcctcataggtgtatagttgtaactcatagatcatgcctttgatgtcgtatccaagaattctttcccttaccctaagtgacaaatatttttctcctatgtttttcagttttatagttctagtttcacatttaggtctctgatccagtttgacttaatttttctatanaaggtgaggtatccatcaaagttattttttaaaaaatatgcatatcctattgccccaacataattttttataatagttataatttctccactggattgcctttgatcatttactacaaatcagttgcctgtgtatgtaggctattcattctattccattgatctttgactgcttggaggcgaatatcatactgtcttaatttctatagctttataataagtctttaagtcaaataatgtgacacttcaactttgctttcaaagttattttggctattctagaggtttttataatttcaatataaattttagaatctacttctttctgtaa

SEQ ID NO: 4725 - DNA, 661 bp, Homo sapiens
  misc_feature [331]..[331]: Chromosome 14, SNP identification no. = rs7492614
  misc_feature [331]..[331]: allele = g, in linkage disequilibrium with rs6574840, respectively
  misc_feature [331]..[331]: n is a, t, c or g
agttccagctcctacgcaccttcagcaacacttggtaatgccagacttaaattttagccagcctcataggtgtatagttgtaactcatagatcatgcctttgatgtcgtatccaagaattctttcccttaccctaagtgacaaatatttttctcctatgtttttcagttttatagttctagtttcacatttaggtctctgatccagtttgacttaatttttctatacaaggtgaggtatccatcaaagttattttttaaaaaatatgcatatcctattgccccaacataattttttataatagttataatttctccactggattgcctttnatcatttactacaaatcagttgcctgtgtatgtaggctattcattctattccattgatctttgactgcttggaggcgaatatcatactgtcttaatttctatagctttataataagtctttaagtcaaataatgtgacacttcaactttgctttcaaagttattttggctattctagaggtttttataatttcaatataaattttagaatctacttctttctgtaaaaaatacctgattgaatttcagtttagattatgttgaatctatagataaattatgagataattggcatctcaattatatcaaatcttctattccatgcacatgg

SEQ ID NO: 4726 - DNA, 661 bp, Homo sapiens
  misc_feature [331]..[331]: Chromosome 14, SNP identification no. = rs4608268
  misc_feature [331]..[331]: allele = t, in linkage disequilibrium with rs6574840, respectively
  misc_feature [331]..[331]: n is a, t, c or g
cctacgcaccttcagcaacacttggtaatgccagacttaaattttagccagcctcataggtgtatagttgtaactcatagatcatgcctttgatgtcgtatccaagaattctttcccttaccctaagtgacaaatatttttctcctatgtttttcagttttatagttctagtttcacatttaggtctctgatccagtttgacttaatttttctatacaaggtgaggtatccatcaaagttattttttaaaaaatatgcatatcctattgccccaacataattttttataatagttataatttctccactggattgcctttgatcatttacnacaaatcagttgcctgtgtatgtaggctattcattctattccattgatctttgactgcttggaggcgaatatcatactgtcttaatttctatagctttataataagtctttaagtcaaataatgtgacacttcaactttgctttcaaagttattttggctattctagaggtttttataatttcaatataaattttagaatctacttctttctgtaaaaaatacctgattgaatttcagtttagattatgttgaatctatagataaattatgagataattggcatctcaattatatcaaatcttctattccatgcacatggtatatctcac

SEQ ID NO: 4727 - DNA, 661 bp, Homo sapiens
  misc_feature [331]..[331]: Chromosome 14, SNP identification no. = rs7493141
  misc_feature [331]..[331]: allele = a, in linkage disequilibrium with rs6574840, respectively
  misc_feature [331]..[331]: n is a, t, c or g
ttgcctgtgtatgtaggctattcattctattccattgatctttgactgcttggaggcgaatatcatactgtcttaatttctatagctttataataagtctttaagtcaaataatgtgacacttcaactttgctttcaaagttattttggctattctagaggtttttataatttcaatataaattttagaatctacttctttctgtaaaaaatacctgattgaatttcagtttagattatgttgaatctatagataaattatgagataattggcatctcaattatatcaaatcttctattccatgcacatggtatatctcaccatatatttnggtcctcttcaatttatctcaacaatagtattatagttttcagcacacaggtcttatacatttttgtcaagtttatccttaaatatttcatactttttctcactattaaaatgactattttaactttgatttctctatgttctttgttagtgttactcattttttgtatgttggccctcagtttaaacttgctaactgatttattctagtttttttgtagattctgacttctatacattttctacttaaaatatcctgtctttgaataaagacaattttacattttcctttccaatcagagtgactgttatttttctgtctaactttatt

SEQ ID NO: 4728 - DNA, 661 bp, Homo sapiens
  misc_feature [331]..[331]: Chromosome 14, SNP identification no. = rs12885876
  misc_feature [331]..[331]: allele = g, in linkage disequilibrium with rs6574840, respectively
  misc_feature [331]..[331]: n is a, t, c or g
tttatccttaaatatttcatactttttctcactattaaaatgactattttaactttgatttctctatgttctttgttagtgttactcattttttgtatgttggccctcagtttaaacttgctaactgatttattctagtttttttgtagattctgacttctatacattttctacttaaaatatcctgtctttgaataaagacaattttacattttcctttccaatcagagtgactgttatttttctgtctaactttattacatcagtgagaactccccactcctgcagtatattgatgaatagaagtagtaacaaggacatctttaccttnttcctaatcattaggggaaaaactttcggtcttactattaagtatgatgttatctctaggtttcttaatagatgtcatttatcagattgagagagctcaattctgtttgtagtttgctgaaattgtaccgaagtggctttgtagttcgtcaagtgcatcatctatgtctatcaagataatcttagggttttcttcttagcttactaacgtgatgacattcctgggacagaacccacttgacgataatatattatttattttatatttcattagactgtatattacatgaatttaaacaataggggaaaatcttctgtacttagccggttg

SEQ ID NO: 4729 - DNA, 661 bp, Homo sapiens
  misc_feature [331]..[331]: Chromosome 14, SNP identification no. = rs12885781
  misc_feature [331]..[331]: allele = c, in linkage disequilibrium with rs6574840, respectively
  misc_feature [331]..[331]: n is a, t, c or g
ctatacattttctacttaaaatatcctgtctttgaataaagacaattttacattttcctttccaatcagagtgactgttatttttctgtctaactttattacatcagtgagaactccccactcctgcagtatattgatgaatagaagtagtaacaaggacatctttaccttgttcctaatcattaggggaaaaactttcggtcttactattaagtatgatgttatctctaggtttcttaatagatgtcatttatcagattgagagagctcaattctgtttgtagtttgctgaaattgtaccgaagtggctttgtagttcgtcaagtgcatnatctatgtctatcaagataatcttagggttttcttcttagcttactaacgtgatgacattcctgggacagaacccacttgacgataatatattatttattttatatttcattagactgtatattacatgaatttaaacaataggggaaaatcttctgtacttagccggttgtttaccattgctagtgtccttcattaacatgttgatctatagttccatctggcatttttcttctatcttgtagtacagatctgatggtggtaaattatttctatttttgtatgtctgagaagtctctcttgaccctgtttttaaaagatatttttgctt

SEQ ID NO: 4730 - DNA, 661 bp, Homo sapiens
  misc_feature [331]..[331]: Chromosome 14, SNP identification no. = rs12590047
  misc_feature [331]..[331]: allele = a, in linkage disequilibrium with rs6574840, respectively
  misc_feature [331]..[331]: n is a, t, c or g
ttaatagatgtcatttatcagattgagagagctcaattctgtttgtagtttgctgaaattgtaccgaagtggctttgtagttcgtcaagtgcatcatctatgtctatcaagataatcttagggttttcttcttagcttactaacgtgatgacattcctgggacagaacccacttgacgataatatattatttattttatatttcattagactgtatattacatgaatttaaacaataggggaaaatcttctgtacttagccggttgtttaccattgctagtgtccttcattaacatgttgatctatagttccatctggcatttttcttctntcttgtagtacagatctgatggtggtaaattatttctatttttgtatgtctgagaagtctctcttgaccctgtttttaaaagatatttttgcttgagataaaattctagattgacagttttcttttctttctgaattcaaaagatgtgctccattattgtattaatttccattttttctaagaagaaatatgctgccatgctttccttccttcctctaagtgtggtttgattttcccccattcagttgcttttaagatttgctctttattactggttttgagcaatttgattatgatgtgccttggtatggatttcttcatgtttcttgt

SEQ ID NO: 4731 - DNA, 661 bp, Homo sapiens
  misc_feature [331]..[331]: Chromosome 14, SNP identification no. = rs11159722
  misc_feature [331]..[331]: allele = c, in linkage disequilibrium with rs6574840, respectively
  misc_feature [331]..[331]: n is a, t, c or g
ctatttttgtatgtctgagaagtctctcttgaccctgtttttaaaagatatttttgcttgagataaaattctagattgacagttttcttttctttctgaattcaaaagatgtgctccattattgtattaatttccattttttctaagaagaaatatgctgccatgctttccttccttcctctaagtgtggtttgattttcccccattcagttgcttttaagatttgctctttattactggttttgagcaatttgattatgatgtgccttggtatggatttcttcatgtttcttgtctcttgggtttggtgagtttcttaaatctatcaacntatagtttcattgtatttggaaactttttagcaagtattccttcaaatactttctgtcctcttatttgaagattctaattccacatttatttggctttttgatgttgccctatagcctcctgatgctacttttacttttttaaatgtttatttgtgtttaattctgcatagtttctattgctatgtcttaaagtttatgaatctttccttctgcaaaatctaatctgcttttaatcccacctagtgtatttttcatctcaattattgaaggtttcatctgcagaatttctttttatgtttctcaagtcactatttgttgaatatatgaaa

SEQ ID NO: 4732 - DNA, 661 bp, Homo sapiens
  misc_feature [331]..[331]: Chromosome 14, SNP identification no. = rs11159723
  misc_feature [331]..[331]: allele = t, in linkage disequilibrium with rs6574840, respectively
  misc_feature [331]..[331]: n is a, t, c or g
tattaatggaacatttagcatgctgtaagtaacaaataactacaattggctgaatattttcttggaaatattgagatccagattcaattatctaattccatcattcataatggcagtagtccacacgtttaatatttccttatagcattcttgtctctcttgagtaaaatatccaattaagtttggctgtctagattatttagaaaaatatattcagaaaaatacaaggagaaaagtatcaagtactttgaaatacctaactaggccataaacctatttcttttactatatcttagcattttattcttaatttttgttatttatcactctnatcagtgcaagactcctgcttggacactccccaaggcattttggcattttactgagcatctacctatagtgttttgaattataaagattaaactacttcacggttaaatctctttctatatactgggccttttcctgttgcaaaagtagatttgttttctaatggttattgaaaagaatttagtttgaaactcaagggaaaagccaagaaaatttatgcttggcgtagtgaacattcagagtagtatgggtgttggccttctcttttttcttttcacatttgcacatacccatggggcagtgaatatttgctattgcacaataaaaagca

SEQ ID NO: 4733 - DNA, 661 bp, Homo sapiens
  misc_feature [331]..[331]: Chromosome 14, SNP identification no. = rs12147060
  misc_feature [331]..[331]: allele = a, in linkage disequilibrium with rs6574840, respectively
  misc_feature [331]..[331]: n is a, t, c or g
ctagattatttagaaaaatatattcagaaaaatacaaggagaaaagtatcaagtactttgaaatacctaactaggccataaacctatttcttttactatatcttagcattttattcttaatttttgttatttatcactcttatcagtgcaagactcctgcttggacactccccaaggcattttggcattttactgagcatctacctatagtgttttgaattataaagattaaactacttcacggttaaatctctttctatatactgggccttttcctgttgcaaaagtagatttgttttctaatggttattgaaaagaatttagtttgaanctcaagggaaaagccaagaaaatttatgcttggcgtagtgaacattcagagtagtatgggtgttggccttctcttttttcttttcacatttgcacatacccatggggcagtgaatatttgctattgcacaataaaaagcataattcttgtgcagttgagtaatagtctatggttgtatttacatgatctcagtctagtgaagtagataacttcagaggtcaggaagaaatttcacataggcacattataaatagtgtgtttgtgagaggaggctgtggatgtatgaggttgaagtccaaatcctgctgcagacataatagcagaaaggat

SEQ ID NO: 4734 - DNA, 661 bp, Homo sapiens
  misc_feature [331]..[331]: Chromosome 14, SNP identification no. = rs2038496
  misc_feature [331]..[331]: allele = c, in linkage disequilibrium with rs6574840, respectively
  misc_feature [331]..[331]: n is a, t, c or g
agggcagcagggtgaagtgagtgcaagcacgggaaatgccacatgcttataaaaccatcagatctcgtgagaactcactcaccatcacgagaacagcgtggaggaaacagcccccatgatccagaccctattacctccacctgatcctactcttgatacatggggattatgggaattaaaatttgagatgagatttgggtggggacacagagccaaaaccatatcatacttgtcgtgaaaggcagtaaatataatgttctatgggggcattctttagaagcaactaaaactagacatccataggatataaagtaatcatgaatcctttctnctattatgtctgcagcaggatttggacttcaacctcatacatccacagcctcctctcacaaacacactatttataatgtgcctatgtgaaatttcttcctgacctctgaagttatctacttcactagactgagatcatgtaaatacaaccatagactattactcaactgcacaagaattatgctttttattgtgcaatagcaaatattcactgccccatgggtatgtgcaaatgtgaaaagaaaaaagagaaggccaacacccatactactctgaatgttcactacgccaagcataaattttcttggcttttcccttgagtttcaaacta

SEQ ID NO: 4735 - DNA, 661 bp, Homo sapiens
  misc_feature [331]..[331]: Chromosome 14, SNP identification no. = rs2038495
  misc_feature [331]..[331]: allele = g, in linkage disequilibrium with rs6574840, respectively
  misc_feature [331]..[331]: n is a, t, c or g
aatgtaccgacagttaaaattttctaagtctcataattaaaatctcactttatttgctttaaaaagaaacactttgtattagtccgttctcacgctgctatgaagaaatacccgagactgggtaatttatagaagaaagagtttcaactgactcacagttctacattgctcgggaggcatcaggaaacttataatcatggtggaaggcaaaggagaagcaggcaccttcttcacagggcagcagggtgaagtgagtgcaagcacgggaaatgccacatgcttataaaaccatcagatctcgtgagaactcactcaccatcacgagaacagngtggaggaaacagcccccatgatccagaccctattacctccacctgatcctactcttgatacatggggattatgggaattaaaatttgagatgagatttgggtggggacacagagccaaaaccatatcatacttgtcgtgaaaggcagtaaatataatgttctatgggggcattctttagaagcaactaaaactagacatccataggatataaagtaatcatgaatcctttctgctattatgtctgcagcaggatttggacttcaacctcatacatccacagcctcctctcacaaacacactatttataatgtgcctatgtgaaatttct

SEQ ID NO: 4736 - DNA, 661 bp, Homo sapiens
  misc_feature [331]..[331]: Chromosome 14, SNP identification no. = rs11848204
  misc_feature [331]..[331]: allele = a, in linkage disequilibrium with rs6574840, respectively
  misc_feature [331]..[331]: n is a, t, c or g
gtggcctttgaggcagaagcacgttgagaagtggtaaaattctgaaccagccatctcacatgtcaccaacttgaaaatagtgtttggggcaatcaaggtttctacttatttttttgttaaatcttcctgccctgaaatgagtcactgctttttctgagcatgggagcagcatcttactcaatacagaagcagaataacattcaagctatataatttttctcaaagcatttttctctcgatgtattactttttattttatatatttcattcacattgggaaggtgtgaggtaaaatagcaacaatgcagtataaaagtaatgcatccttgcnttgaacatattttccaaacaaacatcatgagctatatgaaattccttacccagtaaaggataaaatttaaaagagagtgagaacgaatggaaggctgagtgcaatacaaatgacaatttatgattattacaatcatataatttttatatctttctatgaggtttgtgatatgggaaaatggaaagggaaatatgaagagaacactaagagggaaagttgaaagaggaaaatagtagagcgctttgtacctgggatctgctaacaggtagagggaaccagttggaacattcaccatgattactgggagaaggtgctgggaactgacctgat

SEQ ID NO: 4737 - DNA, 661 bp, Homo sapiens
  misc_feature [331]..[331]: Chromosome 14, SNP identification no. = rs1289351
  misc_feature [331]..[331]: allele = t, in linkage disequilibrium with rs6574840, respectively
  misc_feature [331]..[331]: n is a, t, c or g
aatcctcttacgtttttgtcaggtttccccctgcagatattatgaaatgtctttacctattcaataatagctttaatagaactattgactctaggtcattaattttccagtgtctttgtagtgcccctggcctcttgtggtgctagaagtgacttgttcattggattgaggcagctgagtttcaaaggatccagaaactcttttatttttttctagtgtaaatgctacagctaaatatcacacatgatatatgataatcatacacccaactgtggagcaagtcattcctcaggctgacatgaagaacaaattgtggaaaagaacgcagttnctgaaaatactataagaagcacatcatacgaacacaaactttctcactgaataaattacaaggttttaaggcctgtcatcaacaaagattacctttaaaaattgcacccaagttacatgggatttatttacaccattattggtttctagacaattcaatttccaaccagccattgaattcagctgccatcaactctggcagctgcatcattatcattgtcatgtttctatttattgagtgttttattagtcatatttaatgttttccaaataagagtcctgtgagaagggtagcattgttcccttattccatgtggctgagggtttaaat

SEQ ID NO: 4738 - DNA, 661 bp, Homo sapiens
  misc_feature [331]..[331]: Chromosome 14, SNP identification no. = rs6574840
  misc_feature [331]..[331]: allele = a, g
  misc_feature [331]..[331]: n is a, t, c or g
cgtacaagtatctatagcagatttattcataaaaaacaaaaactgaatgcaaacaagatattcttcaataagtgaatggacaaacaatagtctgtcaaacaatgatacaatggactattattcagtgattacaataaatgagttttcaagccatggaaagatatagataagtcttaaacgtatatgttaagtgaaaaatgccagtctgaaaaagctacacactgatgtactcaaattatatgacattctgaaaaagacaaaactgtagaaaaaataaatggatgccaatggattggagtagagtagagactgggagaaagttagaacagcncagatgaataggtgaagttgaagaggtgaagcggaagggatttttgccataataaaactattccccatgacactgtgatagtgactataacatataagcatttattgaaacttgtagagctttatagcacagagagtaatttttaatatgtgtaaatttaaaaaatcatttaggaatttagatgatcccaggattcaatggtagagtgtgacaaaagaatctaaatgtattaaaaatacatgtaagaacctcactgaatagagtaggagaataacatgctggcctcagtaactttggaaatgagtagggtgtattgaactaaagcaaaat

SEQ ID NO: 4739 - DNA, 661 bp, Homo sapiens
  misc_feature [331]..[331]: Chromosome 14, SNP identification no. = rs7150809
  misc_feature [331]..[331]: allele = g, in linkage disequilibrium with rs6574840, respectively
  misc_feature [331]..[331]: n is a, t, c or g
gaaatgagtagggtgtattgaactaaagcaaaataaactgctataaattaataatgtactctaagactactataagttgtttgctatggggatatgtattaataattcttaaattactaaacctgaataatgcagttgaacaattaagtcaatggatgacagtggtgggatccaggtttctcactgtgaagttggagcttacagataggtaaggggaataaactaaaataatccatatggaaatgtattacagttggagatatcagattaacacatatttagtataagatagatgcagatggttaaatatagaaatatttattgatacacnggtctatactttttaaggcctagaagcgatggcattccaattgcaatgagcacacctagggttcagactttggtttctttttttttttttttttttgagacggagtctcactctgtcgcccaggctggagtgcagtggcgcgatctcggctcactgcaagctccgcctcctgggttcacgccattctcctgcctcagcctcccaagtagctgggactacaggcgcccgccaccatgcccggctaactttttttgtattttttagtagagatgaggtttcaccgtgttagccaggatggtctcgatctcctgacctcgtgatccgcccgcc

SEQ ID NO: 4740 - DNA, 661 bp, Homo sapiens
  misc_feature [331]..[331]: Chromosome 14, SNP identification no. = rs7152193
  misc_feature [331]..[331]: allele = a, in linkage disequilibrium with rs6574840, respectively
  misc_feature [331]..[331]: n is a, t, c or g
ctccgcctcctgggttcacgccattctcctgcctcagcctcccaagtagctgggactacaggcgcccgccaccatgcccggctaactttttttgtattttttagtagagatgaggtttcaccgtgttagccaggatggtctcgatctcctgacctcgtgatccgcccgcctcagcctcccaaagtgctgggattacaggtgtgagccactgcgcccggcccagactttgttttctaacaccattgtctaataaatgttaggtctttggagaggtctttggagaaatggcagattctcgacaggcgccggaaatatgcgtgataaacatggngcagcttatagtgcccagaaaataagaaagttctccacaaacaaacaagcagcaatacaaaaccaaagtcaaagagcagaaacaaaataaaacaaaacaaaacttaataatggatatgtcaaactaatttaagagccaaagtgctcccagtggtcaatctataacaatttaagcaagaaaataaagtactatttaattgtaatctacataagaaagtaaacaatcattactccatactgaaaaagtaaatattaaataaatatgtgaaaatagaaacacctcccttgcaaagaatcctaaataatttatgaagcaacctaccctcatgga

SEQ ID NO: 4741 - DNA, 661 bp, Homo sapiens
  misc_feature [331]..[331]: Chromosome 14, SNP identification no. = rs6574842
  misc_feature [331]..[331]: allele = c, in linkage disequilibrium with rs6574840, respectively
  misc_feature [331]..[331]: n is a, t, c or g
aacaaacaagcagcaatacaaaaccaaagtcaaagagcagaaacaaaataaaacaaaacaaaacttaataatggatatgtcaaactaatttaagagccaaagtgctcccagtggtcaatctataacaatttaagcaagaaaataaagtactatttaattgtaatctacataagaaagtaaacaatcattactccatactgaaaaagtaaatattaaataaatatgtgaaaatagaaacacctcccttgcaaagaatcctaaataatttatgaagcaacctaccctcatggaggtggaacacacctccttactacttaagtgtgggctgtgngtagtaactttcttccaaagagtgtactgtaaaaagaaggagggaaaagagtaacttcagagtgttgaaatctaatgcacattgcctccagacaggtgatcacagttaatatcaacagtatgtcatattgatagtacatattattgatatgatatgatgagaatggactttatctgatggtcttccttccaaaatcacattactccagtctaatcatgagacaaagtccaatgaagggacattctacaaattacttgaccagtactcaacattgtcaaagtcatcaaaaacaagaaaattattagaaattgtcacaagtgaaagaaggca

SEQ ID NO: 4742 - DNA, 661 bp, Homo sapiens
  misc_feature [331]..[331]: Chromosome 14, SNP identification no. = rs11628600
  misc_feature [331]..[331]: allele = a, in linkage disequilibrium with rs6574840, respectively
  misc_feature [331]..[331]: n is a, t, c or g
gatcacagttaatatcaacagtatgtcatattgatagtacatattattgatatgatatgatgagaatggactttatctgatggtcttccttccaaaatcacattactccagtctaatcatgagacaaagtccaatgaagggacattctacaaattacttgaccagtactcaacattgtcaaagtcatcaaaaacaagaaaattattagaaattgtcacaagtgaaagaaggcaaaggagagatgactatcaatgtactttgttatcctggtggtatcatgaaacagagaaaggatattagagaaaaacagtaaatctggataaaatatggnctatacattactatgtatcagttttggttcttgaattgtgagaaaaatatcatactaatataagatgttaataatggggaaattgggtatgcaatatatagaaactcactgcactttcttttcatttttttataaatgtaaaattttattaaaattaataaaataaaaaatttatgtaaaaattataattttaactttcttttttctgttgattgcttctggttctctacctatacaatcatgtaaaagtaaataacagaaattttatttcttcttttacaatcctgatacattttgttccttctgttctcttactagcagggactttca

SEQ ID NO: 4743 - DNA, 661 bp, Homo sapiens
  misc_feature [331]..[331]: Chromosome 14, SNP identification no. = rs10150404
  misc_feature [331]..[331]: allele = t, in linkage disequilibrium with rs6574840, respectively
  misc_feature [331]..[331]: n is a, t, c or g
aaatatcatactaatataagatgttaataatggggaaattgggtatgcaatatatagaaactcactgcactttcttttcatttttttataaatgtaaaattttattaaaattaataaaataaaaaatttatgtaaaaattataattttaactttcttttttctgttgattgcttctggttctctacctatacaatcatgtaaaagtaaataacagaaattttatttcttcttttacaatcctgatacattttgttccttctgttctcttactagcagggactttcagtaaaatgtttgatggaaatggagcttcccaatctcagtgggaangttttcaacactttaccattgaatatgctgcttactcttggtatttttaagattcacttttgtgtgttcaaatcttctataagcatatagataagagttgaagatgttttggaggtagagactaataatcatagctaccatttttgacttcatactgtatatagacactgtgtcaggccctttacttagattattctaagtctacacaatcacaaggtaagtaactttgtggatgtttaaccatgaaaataggtctcagaaaattgaagcattgttcttaatgtcacaaaagttgtccagcaaagataaaattccatccaaagtagcata

SEQ ID NO: 4744 - DNA, 661 bp, Homo sapiens
  misc_feature [331]..[331]: Chromosome 14, SNP identification no. = rs11625354
  misc_feature [331]..[331]: allele = c, in linkage disequilibrium with rs6574840, respectively
  misc_feature [331]..[331]: n is a, t, c or g
tgtttcaaagtgattaggttaaagagaaagtctatgcaattgttaaagccttatggaaaaagaagacaaaaatttggcaatctttagcataagtagtgaccgatacggtggcttcaggaagcactgaactatctatactattaatctgggaaattattaacctgttaattaatctgggaatgtggaagaggaaattggaaagattatcatcatcttaacaaaaaatttgaagagatgtatatcctggattagattttcaaatatgatcaagctagtcactataagaggcaagcctcttcaatgccttacatcttaaaccaggaagcatgantataaggttttaggctgcaaaagagagactggctgtaatattgggtgtaaatgatagtggagatttaattgtgcaacttagttgttatttttgtaagtgctcccattacaaagtctcacttgttttgaaaggtctgcatccagccccatttcctccataagtcctgttatttttggtacatgattccacacaatgtaaaatactttagaaacacatatatgatgttatagcagagtacacaaaggtgacctaatacccagtaatgttgaaatgtttcttctacctggagatcttgagttctatgcagaaagagactgtatctattttgtt

SEQ ID NO: 4745 - DNA, 661 bp, Homo sapiens
  misc_feature [331]..[331]: Chromosome 14, SNP identification no. = rs11846631
  misc_feature [331]..[331]: allele = a, in linkage disequilibrium with rs6574840, respectively
  misc_feature [331]..[331]: n is a, t, c or g
gagttaaatccatactacctcaatctttccaataaattgactttatccatatcaaagttgcctagcaagattattttttatcttcattttttttttcaagaagccacatgtcaaaaagagaattgcctaactccagtcagatcaaatttttttatttcgtagaaaataatgccattaggcggcaggtgcagcaatattttattctattttatatctttctgagtttctatcttagttctcagaaaaacattctgagcttttggctttccactggtgcacacagaatacatgcactgggaataacaaggcagaaattagttatttttaaacngcatctttccaaattggacttgaaatgactctattaaatggtatgatggctggctgagggtggcaaatcaagaaagatgacaaaaagctaggtagctggtcttgttttacttcttcattaatgatcaaaaaggagcaaacagcacattaaatttggatgatattaattcaatagcctttgaaagcccaagtgagatcagggaaaaaaaaaattaagaggcctgtaaaacctagaataggtgaaaaaagattgaaataagagaaaggagacccccagagcttgagaacaggtaacactcagaaccaccatgtaatgaaaagggtatattgt

SEQ ID NO: 4746 - DNA, 661 bp, Homo sapiens
  misc_feature [331]..[331]: Chromosome 14, SNP identification no. = rs10145617
  misc_feature [331]..[331]: allele = t, in linkage disequilibrium with rs6574840, respectively
  misc_feature [331]..[331]: n is a, t, c or g
gttacaaagatctgtctagtttgcaggtgatgagaaaataaggcagcactctcttccaatactggcacagcccatagtatgtgtcaaatcaggtaaaatacgttgttggtaatgcttcttcatttcatatgagaaaagaaaagccagaataatctgagttgttgctaagtctagattgttttatctgccagccaggaagaaccttgaaagcaaagtctatattctattaatctttgtaacctcggtgcttagcacagagcatgaatttgtggagaaagtagtagttccacttggacaatgattggtttgtagtttcttacttaacccaggncaaagatactccaaattgtctttcttatttcaaatggtaggtttagccacatgatatatggacaactccactgatcagattctcctcttaagctgccagttatgtgtgccattctctagtaccctttggttggtagtttcattgtgtgtatgtgtgtgtgtgtgtgtgtgtgtgtatttaattaagcttgacactttgcatgcacagagagctgctagagctttccctgatattttgcaaaaaaggactcttttttagattgaagtcaatgtgaaaaactctcctaatttaaactcttagtttctgtgactctatctgtcttccaaaagc

SEQ ID NO: 4747 - DNA, 661 bp, Homo sapiens
  misc_feature [331]..[331]: Chromosome 14, SNP identification no. = rs1742180
  misc_feature [331]..[331]: allele = a, in linkage disequilibrium with rs6574840, respectively
  misc_feature [331]..[331]: n is a, t, c or g
accttacatgtgagtcaggatagagaaaaggtatgtttttcggtctgttgtgcttgttttctgtagccggtcttcatttttctcaggacaaacgctcgaaggtatgtaactatatataccagcattgcctggtcgaacttgtatggatgagagacaacaccaccacagctcagtaccagcattatgtgttgaatcattgctatgattaaaaatgaaatgaggcagtaatattctattagtggtgattctgaggtgaaggtgtagggattgtgtggaaggtttaacagcatcatctgcagtacttttgtttgcactctccctttcccattcngatatgttgtcaatatttgcaacaattatacaaaggctgcaaaattgaacactgatgagaacctctggacataggctgctctaagcagaacacccaagattgggatataaatatgaaataatgtccaattaaagaacagcctacaatagaaatatatattataaaaaactgaactctcagctgcttttggaagacagatagagtcacagaaactaagagtttaaattaggagagtttttcacattgacttcaatctaaaaaagagtccttttttgcaaaatatcagggaaagctctagcagctctctgtgcatgcaaagtgtcaagctta

SEQ ID NO: 4748 - DNA, 661 bp, Homo sapiens
  misc_feature [331]..[331]: Chromosome 14, SNP identification no. = rs7155200
  misc_feature [331]..[331]: allele = t, in linkage disequilibrium with rs6574840, respectively
  misc_feature [331]..[331]: n is a, t, c or g
ccagaggttctcatcagtgttcaattttgcagcctttgtataattgttgcaaatattgacaacatatcagaatgggaaagggagagtgcaaacaaaagtactgcagatgatgctgttaaaccttccacacaatccctacaccttcacctcagaatcaccactaatagaatattactgcctcatttcatttttaatcatagcaatgattcaacacataatgctggtactgagctgtggtggtgttgtctctcatccatacaagttcgaccaggcaatgctggtatatatagttacataccttcgagcgtttgtcctgagaaaaatgaagacnggctacagaaaacaagcacaacagaccgaaaaacataccttttctctatcctgactcacatgtaaggtgattttcttggaagaattttctaccacaaatgttagcattctgatgcttaatcaacaaggctcacttaaatgccacttttcttaggaagtctttcctaaaatgatataacacgcccttcattgttgtagttgtttatttacactttaaattcttaaagtactcattcaacaaatgtttattaaggacctaatatatgaaggcatggtgttaacgaacgtgtgtataaaatcagtgagtgatgaaaccagccactgttcctgt

SEQ ID NO: 4749 - DNA, 661 bp, Homo sapiens
  misc_feature [331]..[331]: Chromosome 14, SNP identification no. = rs8018359
  misc_feature [331]..[331]: allele = g, in linkage disequilibrium with rs6574840, respectively
  misc_feature [331]..[331]: n is a, t, c or g
acccccaaaacacttaaaaagaatacagagaaggtcatgccatctttcccaggctggtcttgtactcctgggctcaagtgatcctcctgccttggcctcccaaagtgctgagaatacacacatgagccaccacacccagcccagaaacactcttaaagtgtcatttaagctgacatctgagtagttaatcatgtcgaggacatgatcaacgttaggggtcggggcagacatagacaaggctgaaggaaaacacctgctaaagctccaggccatcaagagcttggtatgctcaagagactgaaggcttgagtgtttggaaaggtagcaagcnaggttgagttagaggccagatatggcacagtacttagttgtaacacaaaaatgccgtaaaatgtcattgcaaaatgttaagtaagagattttatacaatttcataatgtagatcttttcacatttgaaggctgcatagttgttggaagagtatttgctttaatttcctttttaaggcaataaggctactgttgttctagcttgggtgtggtcattacttagtagtagtgtctcttccttgatgcctaatggaaagcagatgtcaattaagtaattgttgaattgaactgaactgaactgactaatttaactacttacgtactttccttag

SEQ ID NO: 4750 - DNA, 661 bp, Homo sapiens
  misc_feature [331]..[331]: Chromosome 14, SNP identification no. = rs761974
  misc_feature [331]..[331]: allele = t, in linkage disequilibrium with rs6574840, respectively
  misc_feature [331]..[331]: n is a, t, c or g
aacacatttgcactatgaatccaggcaggttaattgcctagtagaactaaataaacaataattctcaaagaacacagcagaattcagaacatattacttatgatatctagttttcaaacaaaaatttaccagacattaaaaaacaaaacaggaaaacgtaacttttaggaaatagaaaagttaaaataatttgaattccagcgagcctagatgtggacttcaggagataataatttcaaagtggttatttaagatatgatgaaaaaattaaaggaaaacatagtgccaacgaattaacaaatagggaatcccaacaggcaaatgccaaatntcaaaaatggaaattagctagttaaaagtgaaatggctgaaattaaaaatgtattagattagcacaaacacagattagaaatgacagaaaaaaagacttagaaaattttaatataaacaaagagaaataacccaattcaaagcatagaaaagtctttctactcttttaaaaaactttgtttaaaaacgtttttataaaaagtttaaaaaaacatttttaaaaaaagatgagaagacttcaagattcataggacaatatcaggcaacctgatctgtggaaaataaatgccctaacaaacatgtaatttgagttccagaaagagaggagaga

SEQ ID NO: 4751 - DNA, 661 bp, Homo sapiens
  misc_feature [331]..[331]: Chromosome 15, SNP identification no. = rs17545046
  misc_feature [331]..[331]: allele = a, in linkage disequilibrium with rs10518710, respectively
  misc_feature [331]..[331]: n is a, t, c or g
tgggctcccattgtttattattcagcaagcttttattagattgtctctaagcacaaggcagcaagtgcagcatccttctgagtaggctagcaggctggatcaatatttccaggcatttaaaatcttggataaaatagtgctatgttttcatctcggctccagaagaggagtcctgcatgtagtctgtctcagaaagagggtatagaaagacacaggatgacattagcatggacaataatggtctaatgatgatagaattcacgaataagatggtacatttttcaagtgaagttaccttcaaataatattttactcttttgtgacagtttancctaaatgtatataaaaaaatagtactactgggcgacacgaaagcatttttgtgctaacttcaaatgaaataccacgggaagattatactaatttaaaaattaacaacgtacatgaatttttgtctattactacatgtaaacatgaagtgagacagagactagatgagcttatttgtctgtagtagatgaatcaaaccaagcacagtgacttgggaccaaagagaagccatgtgaccacagggcctttggttgtgcaaacctcagaaggccaaactatcctaaggaaatgtgggtgggtgacatgagccacatgtcagatatcagatttt

SEQ ID NO: 4752 - DNA, 661 bp, Homo sapiens
  misc_feature [331]..[331]: Chromosome 15, SNP identification no. = rs8039795
  misc_feature [331]..[331]: allele = g, in linkage disequilibrium with rs10518710, respectively
  misc_feature [331]..[331]: n is a, t, c or g
cgtggtattgagggagttctcactatctgatctgatggttaaaaagtgtggcactttccttcgctctttctcctgccgccttgtgaagaaggtgctttgcttcccccttgccttccaccatggttgtaagtttcctgaggcctccccagccatgcagaactgtaagtcaattaaacctctttcctttgtaaattacccagcctcaggtagttcttttcagcagtgtgagaacggactaacacagtaggtaatgatggtatggtagctgctggtcttattattatttttatcactgttgaatatttactatgttgtaagtattctcacaatnttttctcacaagttcttttgagacaaaatattgttattacctagttactttacactcaagaagatgagggacatgaagggaggtaatatttattaactacctcttatgtggcaggcagtgtgatagaaattttcatacgtgttattaaattttattcttaaaacctttgtttaataaggtatatagaggaactataattacacaggtgaggaattggagactcagaaaggttaaataatttgcccgaggtcatgaagctggtaggtggtagaactgggttgcaagtaaccaggtgtgctttgtccctggattgcattctgttttcacttg

SEQ ID NO: 4753 - DNA, 661 bp, Homo sapiens
  misc_feature [331]..[331]: Chromosome 15, SNP identification no. = rs11858823
  misc_feature [331]..[331]: allele = a, in linkage disequilibrium with rs10518710, respectively
  misc_feature [331]..[331]: n is a, t, c or g
ttgtgaagaaggtgctttgcttcccccttgccttccaccatggttgtaagtttcctgaggcctccccagccatgcagaactgtaagtcaattaaacctctttcctttgtaaattacccagcctcaggtagttcttttcagcagtgtgagaacggactaacacagtaggtaatgatggtatggtagctgctggtcttattattatttttatcactgttgaatatttactatgttgtaagtattctcacaatattttctcacaagttcttttgagacaaaatattgttattacctagttactttacactcaagaagatgagggacatgaaggnaggtaatatttattaactacctcttatgtggcaggcagtgtgatagaaattttcatacgtgttattaaattttattcttaaaacctttgtttaataaggtatatagaggaactataattacacaggtgaggaattggagactcagaaaggttaaataatttgcccgaggtcatgaagctggtaggtggtagaactgggttgcaagtaaccaggtgtgctttgtccctggattgcattctgttttcacttgacaataacgcctctcggaaagagcaaataacctccacatgcagggtctttgtcttatctctcagaggtatttgtctcccc

SEQ ID NO: 4754 - DNA, 661 bp, Homo sapiens
  LOC388123
  misc_feature [331]..[331]: Chromosome 15, SNP identification no. = rs690535
  misc_feature [331]..[331]: allele = g, in linkage disequilibrium with rs10518710, respectively
  misc_feature [331]..[331]: n is a, t, c or g
agttcatgcctaagctagaccacaaaaacccatttcaactaaattttccctgaactttcaggaccctgctatcctaaacctgataataaaagtgatgattttcaccatgtatctagtcaacaaatatttaatggcttgcaatggcctgaggtgtaaatacggaaaatacctggtcctaactctcaagttgcttatctggtagactatataagatttgaacaaataattaccagaaaaggcagttgctgatacatgaacgggaaataaagtaccctggaagcattctggtagggtggagaaagccttcttggaggtggcatttaagttagcntcacagaatgggtaaggatctaacaggcagagaaaaagggataggaacttaagacagaatgatttgaaatcccctcttaaaaacaatccagcaggagcctggtaaatgatcttacttctcatgctctatagtttcctcatgctaaggtctacagagttgagataatttccaagagtctgacacagcagctctttcccttactagggcatgaatagcagaactgcagttaacaagtcttcatggtcccagagagaaattgatatttgctgactgcattgtgctgaagtaaaattacaagagtgcattaaaatcctttgtaaagaaggttga

SEQ ID NO: 4755 - DNA, 661 bp, Homo sapiens
  LOC388123
  misc_feature [331]..[331]: Chromosome 15, SNP identification no. = rs689991
  misc_feature [331]..[331]: allele = g, in linkage disequilibrium with rs10518710, respectively
  misc_feature [331]..[331]: n is a, t, c or g
aggtgagagaaccaaacatgaatgccagacagcagaagtgagcagcgaggaagaatgctcagttactccctgaggctgttccagtggaaagtccacagctgctgccacctgtcactctacattcataaaactactacctgaacaccagaacctctgctacagctgctgcagattaactcaacacttttatgaccagtgcttgccagaaaaggctgtggccttatcaattttaattttttaatccaaagactcacagggtgcatttgcttggttgaagctagtcatgtgcaagggatgtttgaaatggaggttttcagattcttcttggganaagcttaatgaatcatgcgtaaaactaccaaaatgaggttaacagaatcattgggagccacaaatgacaggtctattttatctattgtatcatcacttagactatttgcccttagaaagtttgagcacaggttttaaaaaacatttaatgatatgcacagaggggcctggtagagtataccatttcaacattttaccaggtgtaatgttctgaatgtgttcccttaaatttatgtgttggaaacataatcctgaatgtaacagtgttgggggctggggcagaatgggacatgcctaggtcatgaggactctgccctcatgaaaggattaa

SEQ ID NO: 4756 - DNA, 661 bp, Homo sapiens
  LOC388123
  misc_feature [331]..[331]: Chromosome 15, SNP identification no. = rs584758
  misc_feature [331]..[331]: allele = g, in linkage disequilibrium with rs10518710, respectively
  misc_feature [331]..[331]: n is a, t, c or g
gctcagttactccctgaggctgttccagtggaaagtccacagctgctgccacctgtcactctacattcataaaactactacctgaacaccagaacctctgctacagctgctgcagattaactcaacacttttatgaccagtgcttgccagaaaaggctgtggccttatcaattttaattttttaatccaaagactcacagggtgcatttgcttggttgaagctagtcatgtgcaagggatgtttgaaatggaggttttcagattcttcttgggaaaagcttaatgaatcatgcgtaaaactaccaaaatgaggttaacagaatcattgggngccacaaatgacaggtctattttatctattgtatcatcacttagactatttgcccttagaaagtttgagcacaggttttaaaaaacatttaatgatatgcacagaggggcctggtagagtataccatttcaacattttaccaggtgtaatgttctgaatgtgttcccttaaatttatgtgttggaaacataatcctgaatgtaacagtgttgggggctggggcagaatgggacatgcctaggtcatgaggactctgccctcatgaaaggattaatgctgctataaaaacagcctgcaggagtggctttgctctcttctgctcttctgccc

SEQ ID NO: 4757 - DNA, 661 bp, Homo sapiens
  LOC388123
  misc_feature [331]..[331]: Chromosome 15, SNP identification no. = rs12442241
  misc_feature [331]..[331]: allele = t, in linkage disequilibrium with rs10518710, respectively
  misc_feature [331]..[331]: n is a, t, c or g
aaatggaggttttcagattcttcttgggaaaagcttaatgaatcatgcgtaaaactaccaaaatgaggttaacagaatcattgggagccacaaatgacaggtctattttatctattgtatcatcacttagactatttgcccttagaaagtttgagcacaggttttaaaaaacatttaatgatatgcacagaggggcctggtagagtataccatttcaacattttaccaggtgtaatgttctgaatgtgttcccttaaatttatgtgttggaaacataatcctgaatgtaacagtgttgggggctggggcagaatgggacatgcctaggtcntgaggactctgccctcatgaaaggattaatgctgctataaaaacagcctgcaggagtggctttgctctcttctgctcttctgccctgtgaggatgcagcaagaaaaccctcaccagatgccagtgccttgatcttggacttcccagcccccagagctgtgagaaaataaatttattttctttatagtaaacagttgattcagatgagcaaagccctctgtgcctccagtcttctcccaacagtgtgcctgtcagctgctcagaataaatatttttcagtgggattggctgacttttgatctatacacctgtcagagtctgattcatattt

SEQ ID NO: 4758 - DNA, 661 bp, Homo sapiens
  LOC388123
  misc_feature [331]..[331]: Chromosome 15, SNP identification no. = rs12440597
  misc_feature [331]..[331]: allele = t, in linkage disequilibrium with rs10518710, respectively
  misc_feature [331]..[331]: n is a, t, c or g
ctgattctattctgtgaagaacatagtagtaattcctaagaaactgagatgtgttatatatgtttaagatatatttctttccttaaaatttcagatttgggaacctgggaaattaggttgagggtaaacacacctagtagcttcttgtccagacaaaatcaagaggaggcagagattgagaacagtggagagggtctcttgtagtagggtgaccaattcctcctggtttccctggggctttctaggtgttagcactgtaagtgaacataaagtgagcagagcttaggagtgtagagagacctcatgatgtcctgcttctctcctctcttcntacccaggactagatcgctagctggccctttgatttaactcttcatctaccatagtaagtacaagttttatgtatatagacttgtctcttttgacagcaatgattatagtttcaaataacagacagaagaacccattaaagctgtatatgtgggaaatgtgaaagacaaagctttcttttgatttattttttcaaaatgtataaatggtagactatgtgctaggaaaaatagatgtgaataaataaaattatggtggaaatttttgtctaggcattttacagagtgggtgagtttacatattctctgggttactgtgatagttgtgacag

SEQ ID NO: 4759 - DNA, 661 bp, Homo sapiens
  misc_feature [331]..[331]: Chromosome 15, SNP identification no. = rs17627721
  misc_feature [331]..[331]: allele = t, in linkage disequilibrium with rs10518710, respectively
  misc_feature [331]..[331]: n is a, t, c or g
tagctcttcattcttagagggaagagggtgggcagagagagagagagaaagagagagagagacttgctttagtgagcatatactgtgtgcggaatctttcataggttatttcttttcatcttctcaacaccattgtaaactccatactattgctctcattgtatacagaagggaaagactctctaagagctgcagtcaggggtggaggcttagttcacctgattgatccgagataagcaggttcactgttagagagggagactgtgtagcatttcaggttttcacaatgtacaggttagttactagggctaagtgatgatatttggacttncccattggcagcttaagtgacacagaattgaagattgttcagtttgggatggtcaagtagctgtaatccaggtcatctctctggatgctgaagccatcaagaaagatgcactgcattctgagaccatagttagaatcataagggagaaggtgcaatcaccatgctgaagcttgcaggatagggagaaggggatagtgctggctgtagaaaaaatactgttgacatttggcaaagaaacaatgatttggaagctcccttaggagtttaataaaaagctgtctcctgtccattaatatcctaaacattaattggctgagtgtgcagaactat

SEQ ID NO: 4760 - DNA, 661 bp, Homo sapiens
  misc_feature [331]..[331]: Chromosome 15, SNP identification no. = rs17545312
  misc_feature [331]..[331]: allele = g, in linkage disequilibrium with rs10518710, respectively
  misc_feature [331]..[331]: n is a, t, c or g
gatccgagataagcaggttcactgttagagagggagactgtgtagcatttcaggttttcacaatgtacaggttagttactagggctaagtgatgatatttggacttgcccattggcagcttaagtgacacagaattgaagattgttcagtttgggatggtcaagtagctgtaatccaggtcatctctctggatgctgaagccatcaagaaagatgcactgcattctgagaccatagttagaatcataagggagaaggtgcaatcaccatgctgaagcttgcaggatagggagaaggggatagtgctggctgtagaaaaaatactgttgacntttggcaaagaaacaatgatttggaagctcccttaggagtttaataaaaagctgtctcctgtccattaatatcctaaacattaattggctgagtgtgcagaactataatgcttacagtcaatgggggataaaaaagcaaagaatatcgcttctgtcttcaagggttctgccttctgatttgttagacaaggcagacattcatgcaacaaaggaaggttacaagggtcttaagtttagaggagacttttgcacttttgagcttggactttgacagagattgacgaggatgaggcagatgggcactgaagggaaggatcctcaaggattcta

SEQ ID NO: 4761 - DNA, 661 bp, Homo sapiens
  misc_feature [331]..[331]: Chromosome 15, SNP identification no. = rs576633
  misc_feature [331]..[331]: allele = a, in linkage disequilibrium with rs10518710, respectively
  misc_feature [331]..[331]: n is a, t, c or g
gggttctgccttctgatttgttagacaaggcagacattcatgcaacaaaggaaggttacaagggtcttaagtttagaggagacttttgcacttttgagcttggactttgacagagattgacgaggatgaggcagatgggcactgaagggaaggatcctcaaggattctattccagggaaatgattcgagcaataccactgaggggacaatcagcaagatatgctcaggtggtggtcggtgagtttccctggaatagaacggactgagttggtgcatgatataatatatggagggttttgaactctactcaaatgaagctgaacatcttgantcaaaccccaattctgtggcaatggtctccaaatgaggaaaaaagatgaaaagatcttaggcatcagggtacaatttgaaggaaagttcattttctctctgttttcgctactactttgtagtagacaattttctttttttttttttttattatactttaagttttagggtacatgtgcacattgtgcaggttagttacatatgtatacatgtgccatgctggtgcgctgcacccactaactcgtcatctagcattaggtatatctcccgatgctatccctcccccctccccccaccccacaacagtccccagagtgtgatattccccttc

SEQ ID NO: 4762 - DNA, 661 bp, Homo sapiens
  misc_feature [331]..[331]: Chromosome 15, SNP identification no. = rs16965586
  misc_feature [331]..[331]: allele = a, in linkage disequilibrium with rs10518710, respectively
  misc_feature [331]..[331]: n is a, t, c or g
gggattcaaatcaatgattaggataagtatggtgtatagaagatgaggagaagattgaagataacttcgagtttcccatataccttgaaggtggttggcccataataagcagtcaataaatgcttgttgaataaatacgtgagattgacatcattcactaggaagagacagtttaagaccggccaagtttatggtgtcttctaggtacctagcagagatatttagaagacagactataaaatgaaaatgattccaaaagtagtttgctcttatggacatatcccttgtacataatttgcatttttcttttttctctttccctcaatagtcntcacacttcttgtggatgaagatcaggtcttaaacttctcttctctctccctgaaacaggcagggcagtggctgctatataatgttagctaacatttattgagcccatagtatgtgcatagcgctgttctaagtgttatatatgtaataattcatttagtgtttccaatagatctttgaggtaggtgctattgttacccccattttaactgaagaaattgaagtcagagaagttaaatggtttgcctgaggtcttacatgctgaagctaggatttgaagccaggcagtcttccgattttccttgcaattttcccagcaagtagctgaact

SEQ ID NO: 4763 - DNA, 661 bp, Homo sapiens
  misc_feature [331]..[331]: Chromosome 15, SNP identification no. = rs16965587
  misc_feature [331]..[331]: allele = t, in linkage disequilibrium with rs10518710, respectively
  misc_feature [331]..[331]: n is a, t, c or g
ttccctcaatagtcgtcacacttcttgtggatgaagatcaggtcttaaacttctcttctctctccctgaaacaggcagggcagtggctgctatataatgttagctaacatttattgagcccatagtatgtgcatagcgctgttctaagtgttatatatgtaataattcatttagtgtttccaatagatctttgaggtaggtgctattgttacccccattttaactgaagaaattgaagtcagagaagttaaatggtttgcctgaggtcttacatgctgaagctaggatttgaagccaggcagtcttccgattttccttgcaattttcccancaagtagctgaactacctctgacccccagaaccagtgaactaacacgttgtgaagtctgttgggggcctccctggaattctgttgattgtacctcaatgacaaatttttgtgaatgctgccaaagacatttttgtagtaaatcagatgcgaaggataaaagagcaaaagcctcagaagtggggaaatatataatttattttgaaagtataaatggagacataaaaagtaatttctgaatgagcagttatgcaggcctaggataaagtttatttgtgtgtttattagaataatgagattttaagatcggaaaagccctaattattataggc

SEQ ID NO: 4764 - DNA, 661 bp, Homo sapiens
  misc_feature [331]..[331]: Chromosome 15, SNP identification no. = rs7181898
  misc_feature [331]..[331]: allele = a, in linkage disequilibrium with rs10518710, respectively
  misc_feature [331]..[331]: n is a, t, c or g
agagtttcagaataaaaccacagtgttttctggaacatctttctttgtaactgaacttgatatagtaattgctatactttcttgtgtttgtgtccaataatttcaaacttcaaatgctaaaaatggaggcaaataccacattccctgataaagcaagagagaaaaaagcctatcagttgttttgcttttctgaaggcctgttgtgaatttcaaaatacagcaaatcattttctgtgggagactccaaagtgaaattgtaatgattcctggctcagtgagttaaatatcaattgatcatttttgtaaccagcctctaattgatcaaaaattntaggtttcaatatcaaaagggaatatgatctccctagcactaagcagtgttaatttggtccatgtgggagactagggaattggtaattccatggagaaagaatctacttctggaagctgtctccggaagttgcactggagtcaatttgaacaaacaagggatttatggaagatgatactaccttcttttaaaggacaaagaggaagaccatgttctcccattgtcataatatttactgagagattcttttgtgctattctcaatacagattgttggaccaaagccatagggtaaagattagtagtgtggacgtttgcatggtatgatacc

SEQ ID NO: 4765 - DNA, 661 bp, Homo sapiens
  misc_feature [331]..[331]: Chromosome 15, SNP identification no. = rs11070957
  misc_feature [331]..[331]: allele = t, in linkage disequilibrium with rs10518710, respectively
  misc_feature [331]..[331]: n is a, t, c or g
aatgacgcaatgctgtcacattttacagatgagaacattgaggctagagaggtcatgagtttgtccatgtcctatgccactcaggagatggtcctctctgactacaggaactgggtcatctttaccttaagttctcctcagtgcttctcacagtgccttgaatctagtaggttctctatgaacattttctaattgagtggaactgagataatttaccaactaactaacaagcactatacctactacacttaagtggaggggttgttttccattttctttcttctaatctttctcaatggactttcctggtgtggcagagacaacgccacangttcatacaggaagactatgtgtcatatctcctgctttgagtgaggtcacatgatacattctgcctgcggaatatggaaggatgtcctaggccaggcctctaaaactccactagattcctcccccacccaaacctcattctctgtcttcctgaatataaaacatccagcacagaatcctgcagtctagactgaagaagcctgggtctctgactaactgcatgaagcagatgccccctttccaaccctttcaaccaacctgcgctggactaggcataaaagatagataatcttttattatgtaaagaaattgagacttcagggttattaca

SEQ ID NO: 4766 - DNA, 661 bp, Homo sapiens
  misc_feature [331]..[331]: Chromosome 15, SNP identification no. = rs10518706
  misc_feature [331]..[331]: allele = t, in linkage disequilibrium with rs10518710, respectively
  misc_feature [331]..[331]: n is a, t, c or g
ctatagtctagatgtgtagtagcttataccatgtaggtttgtggaaatacactctatgatgttcacacaatgacaaaatcacataacaatgtgtttctcagaatgtattcctgtcgttaagttatgcatggctctctctctctttctatacattatagtactggcccatgtgatgacaaatttggaaactacaactttagcggatatttttccagacatagtaatctctgtcatttggggaagggggttttcttttggtatgttatcagtcttgggtaatctgtctttatctgagcaaaattaaaattttatctttaccttcatatcaatnaattcatgtatggaaaagctttgatctcttttggctatagggactagggacttaagatctctttctctttctttctctgcatgtgtgtgtgttttagaggaaaagagctggcctcttaaggctaggctacaggaactgactcatggccattttggtttcttgacacgcaggaataaataaatttgcttactgtcagccatgttaatattggattaattttacttttatacctaatgcaacatttttagtaaagtaattaataaattactatgagataaaaaagcaaggtttggggtctgtactacattttacaaagcaacaatagttaac

SEQ ID NO: 4767 - DNA, 661 bp, Homo sapiens
  misc_feature [331]..[331]: Chromosome 15, SNP identification no. = rs10518708
  misc_feature [331]..[331]: allele = g, in linkage disequilibrium with rs10518710, respectively
  misc_feature [331]..[331]: n is a, t, c or g
tcagtggctgataatcatagggggaaaataaaagatccctgtgcattggggtctgcactaactgaaatacaggagtcatatgtgactgggtagatgaactacaaaagatgttgagtgtggtgattggtcttttgcccagccctaagaagtatgaattcaatggggatagaaaccagtttagaggggattaggagggactggatgatgaagaaggagggagagagcatgtataacggttttctggccaggaggatacaagtccatttcaatagagagcatttgattcctccctcagcccaactccatctgaggagggacttagtagatagtnactttccacctcttcctcctaccgatgagactgacatggaatttaagggtaggggcctgactttttaaattcatctctgcattcctagcacccagagtagtgcctagagcagggtaggtgctcaataaataattattgactaactgaataattaatgagccagaaactgaggccagaactgctggttctaagatgatctccagtggcagggggtgaagcaagggtggtcaaggtgctcctatagggcagctaggaatgacaaaaaacaggagaccaaagccgaaggtcaaagtgcagaggtaaattttagctttaagcctgagggggtga

SEQ ID NO: 4768 - DNA, 661 bp, Homo sapiens
  misc_feature [331]..[331]: Chromosome 15, SNP identification no. = rs10518710
  misc_feature [331]..[331]: allele = c, g
  misc_feature [331]..[331]: n is a, t, c or g
tacataaaatggatagaagtaggtatgtacttagacatgttaaggacgaaggctcccagaccagaagactgcaagttagcagggttttcccagtgcttattgaggagagtaagcaacataaagggcaaatgtgttgatgaggtggatgtggggtggatcatcaaaccagaactataaatgcctactctgtgccaggaggtagatgttttaattaaatcctcacaacaaccacgtgaagccacgcagagattttagatgagatactaagtggttaaggagcttccatgaggtcacatggcttcaaaatggagggccagcatttagcatcttngtcttctgctcccagagatcatgctctttccccctcactgagctgctggatgtctctgtccatgcgggtggcatggcctccagggacttaggaaatgacgctgtggaaatgtgtgcttgcttttcccacttgctttttgttcattgggttacttttcctctccagattagtttttcagtttaattggttttggtcttggaattttttataaaactagttattctccctattttgcttaagaaaatgtattccatttgatattttctgaccttactcttgggtgggggaataatagagtattttacatgggaatgaattgtgttgtcgtag

SEQ ID NO: 4769 - DNA, 661 bp, Homo sapiens
  misc_feature [331]..[331]: Chromosome 15, SNP identification no. = rs519957
  misc_feature [331]..[331]: allele = g, in linkage disequilibrium with rs10518710, respectively
  misc_feature [331]..[331]: n is a, t, c or g
caaagaagaaaaaaaaaagacacatgcatgtgtgtgttcgttgcaccactattcacaatatcaaagatatggaaatcaacctaaaggcccatcaatgatagactggataaagaaaatgtcgtacatataatatacaccatggaatactatgcagccataaataagaatgagatcctatccttttcaggaacatagatggagctggaggcccttagcaaactaaggcagaaacagaatatcaaatactgcatgttctcacttataagcaaatccccatgacacaagtctacctaacaaacctgcacgtgtagccctgaaattaaaataaaanttttaaaaaaaaagaaacccagatatgcatgactttctctcctatagcctctgttgcctcctctcatcccctgtggtgacagttctgctgctgctgggttacagccctgccctgtccctgtagttctgcctatcctgccaacacctttgttgttagtccctttgtaaatagcctctccttgaattctcctaattgagtgtgccacctgtttcctattgggatctggactgatacattgatcatgacttctaagagacatacttccattgtccttttaaaaaaaattttttttttgcttaagttactttaagtaggattttcattccttgt

SEQ ID NO: 4770 - DNA, 661 bp, Homo sapiens
  misc_feature [331]..[331]: Chromosome 15, SNP identification no. = rs690133
  misc_feature [331]..[331]: allele = g, in linkage disequilibrium with rs10518710, respectively
  misc_feature [331]..[331]: n is a, t, c or g
gtgttaaggtgtttattttgctgcctcatataaaagaatgagaagttcatctgcacagttaggccttctgtttgctccagctctaaataactgaggagcacctctaatccagacctcttttatggaggcagagtgagaaccagaatttgttctgcagttgcttctcttagtctgcaaacaatctaggtacagcaggagctgcactgttcttatgggtgattgtttgtgcgtgtgtatgcgagcacacgttcacctgcttgtgtgtggctccctaggaactattactcaatattaattttatgggggaactgaagactaaaattattagtgnccatgcattgggaacatcacttagttttatttagtgagtagtagtgagcaacataatgagcacatcacaaattcagtcagacaacactaggcttttactttatatccttaggagagcatattttacctgtgtgaaaaactaacagggtgccacaaagtaataattatgctcatttacatggctacatttacagcacaacttgagacatatacaatttcaacttccttctctttatacatttcaaatgaaatgcagttgttttatatatatatatatatatatatatatatttattatactttaagttctagggtacatgtgcacaacctg

SEQ ID NO: 4771 - DNA, 661 bp, Homo sapiens
  misc_feature [331]..[331]: Chromosome 15, SNP identification no. = rs1912650
  misc_feature [331]..[331]: allele = c, in linkage disequilibrium with rs10518710, respectively
  misc_feature [331]..[331]: n is a, t, c or g
tcaattatccacaagtggattatccacttgctctattacccacaacatattttaaattaaagctgctgtcattaggtgactcagtagccctaggccaatttctatcataacttctctgtgcagccggaaatgcaaactcattttgatagccttttctaatatgatgggtgggaatatactattggggttgttgccaaaaatgtaagtgtaaaagactttgacattgtgttttgttttggataaccctttcaaattagcaagattccttccctcagcaagaaaaatcaagatagcaattacaagcgtgggctcatcaacctgttgtaaatanaaagtatctcaagaaatagctttgcctggtgctctctgtaaatgactggcaaaataatttgggctgaaatgctacctgatttatgaggtctccctgcatttgccattcataattgttcaagtcttcttctggggaagccttgagtagtgaaacaaaatcatgtgctttggaatcaggaagatctgggcctgaattctgtttctacaacttcttagccgagctatctggaaaaagtagttagccttgctgaacttcactttctttgtatttttaaatagccataacaatatctatgaaaataatataatatatgtaaaattcataactgag

SEQ ID NO: 4772 - DNA, 661 bp, Homo sapiens
  misc_feature [331]..[331]: Chromosome 15, SNP identification no. = rs17628175
  misc_feature [331]..[331]: allele = g, in linkage disequilibrium with rs10518710, respectively
  misc_feature [331]..[331]: n is a, t, c or g
cacttttataactcacccactcctgtgacaatgaggactcagccctcatgacctaatcacttcttaaaggactcacttctcaacagtgttacattggggattaaatttctaacgcatgaattttggggggacacattcaaaccatagcagaacacaatacagcaaatcttccacagacttataattttaatgtaagcataagtccttagtgaaatgaacaatttattaaccctgggaagttaaagatttttttcattgtgttttttagccatgaactacctctttctcctttgatgtgtccagttgaagtatcatagtcattgcttagctntttagtttgtgccttctctgtccatggtactgaatggttctggcagcagtaatcgaatattgcaacaaagcgaagccaggataattatggttacacttctgtgtgttaggtgactggcaacaaaacagcaatattattcttttcaatgtatttctttgtttaatttttgaaccacatgttaattttatttaaatactatgattataagaatatatactttaaatatagaaatagtttgccctttatttacacaagaatacttttatttacagatctttgatgctaaaagcagaatggactgagagatgccttggacataagtgatttcac

SEQ ID NO: 4773 - DNA, 661 bp, Homo sapiens
  misc_feature [331]..[331]: Chromosome 15, SNP identification no. = rs538505
  misc_feature [331]..[331]: allele = g, in linkage disequilibrium with rs10518710, respectively
  misc_feature [331]..[331]: n is a, t, c or g
acaccctagatccctttgcttgaacaggtttttgttttggttttggttccatgaagtttttttggacttacgcaccaaagcatccttgcacaaatcagtccttcacttccttcccaggcatggatcagaatgagttttgatacagtggggaatctttggctaactccactaagtaggtgccatctttgagctgcagaccaacagaaacatggcctagagaaaatgagttcatggtttgatccagtcttcagtctctattacacatgccttacagctactggcaactgcaaaagagaaatcctgcccatttggtaaaaaatttacctgaacntgaatccactgtagggcctacctctgtgggcagtgacaggaagaaaggcagccagactatccattcctgacaattctgtctacagattcctagggacatcttgctggggaaattgctcaccagtgaatatttgttatcaaagatttttaaacagaaagaataaaaaagcaggctgtgaagtgtttgcttgtgtactgagattcatgagatagagaggcaagacatgaaaaacgtattttgtatctatataagaagtaaccagttttgtgaggaactctttgaggaactgagaagtgaaaaactcttcagttagaaaggtgttttattaca

SEQ ID NO: 4774 - DNA, 661 bp, Homo sapiens
  misc_feature [331]..[331]: Chromosome 15, SNP identification no. = rs690050
  misc_feature [331]..[331]: allele = g, in linkage disequilibrium with rs10518710, respectively
  misc_feature [331]..[331]: n is a, t, c or g
atacatggtgctggcatgaatttgctatattgataaaagagatgtcatattgctttattttttaaatcaaatcttgaatatagctctaagcccctaatctctatggtggaaaggaaaaaaaaatcagcctctattattcttggagcactttcttcaatctctctaaggaattagaaaagaatatggggtgtttgtggcatcagaaaacagaagcagagcttcaaccctggcccatcatcatcacctctgaatgtcattgcccaaaaccatgtaagacagttaaaggcagtaggatttccttcctctgtacaaagtgaggacacccagattnctcaccacaaaagccatagtgcttagagtctaatcatcatcaccatccacccaccttctaacatcaaggtagtactcattggaaagcctgccccacttggatgttgcatgccagtagggcatgaccatttgctactcaccccccaacgcatacccctaatcacccacacacatggtcaaactatttctttcccttcaccttttggagcgcctcttcttctaggacaattcaactttactttctgcaacgtaagatttggttactggacaggaaattatatccttccttgaatcttctccaacaatgagaatgaaatggagaataatacta

SEQ ID NO: 4775 - DNA, 661 bp, Homo sapiens
  misc_feature [331]..[331]: Chromosome 15, SNP identification no. = rs690013
  misc_feature [331]..[331]: allele = g, in linkage disequilibrium with rs10518710, respectively
  misc_feature [331]..[331]: n is a, t, c or g
taagcactatggcttttgtggtgagcaatctgggtgtcctcactttgtacagaggaaggaaatcctactgcctttaactgtcttacatggttttgggcaatgacattcagaggtgatgatgatgggccagggttgaagctctgcttctgttttctgatgccacaaacaccccatattcttttctaattccttagagagattgaagaaagtgctccaagaataatagaggctgatttttttttcctttccaccatagagattaggggcttagagctatattcaagatttgatttaaaaaataaagcaatatgacatctcttttatcaatatngcaaattcatgccagcaccatgtattatttcaagaaacatgtaattaggctcgaaatctagagctttcttgcaatcattttgttttgtgcatgtgggcttcagcttttatggcaagatttttggttaactagttctttagaggtaaattttaggtgcacatggtccatgcatgtaaagttgtcatgtcgttctgtatttttatatttttctttttaaatcttaaagcaaattattataaatcccttaagtaacctcacttgttacagatgtctcatgaatatcacatccaaaacctagtatctgatcatgaaacttgatttaaaagcagc

SEQ ID NO: 4776 - DNA, 661 bp, Homo sapiens
  misc_feature [331]..[331]: Chromosome 15, SNP identification no. = rs578363
  misc_feature [331]..[331]: allele = g, in linkage disequilibrium with rs10518710, respectively
  misc_feature [331]..[331]: n is a, t, c or g
tttgatttaaaaaataaagcaatatgacatctcttttatcaatatagcaaattcatgccagcaccatgtattatttcaagaaacatgtaattaggctcgaaatctagagctttcttgcaatcattttgttttgtgcatgtgggcttcagcttttatggcaagatttttggttaactagttctttagaggtaaattttaggtgcacatggtccatgcatgtaaagttgtcatgtcgttctgtatttttatatttttctttttaaatcttaaagcaaattattataaatcccttaagtaacctcacttgttacagatgtctcatgaatatcanatccaaaacctagtatctgatcatgaaacttgatttaaaagcagcaatttcttcgccatttccagagaattacatgtttaggggaaaacaatttaaactcagtgtattacagaagcaaaataattcttttcagaaccttgtgtcagtcgagtagacaatcctcttggttggttggcttttgtttggtccaattggactcaaaatatgagcatgaggctgggcgtggtggctcacgcctgtaatcccagcactttgggaggccgaggtgggcagatcacttgaggtcaggggttccagaccagcctggccaacatggggaaaccccgtctc

SEQ ID NO: 4777 - DNA, 661 bp, Homo sapiens
  misc_feature [331]..[331]: Chromosome 15, SNP identification no. = rs473249
  misc_feature [331]..[331]: allele = g, in linkage disequilibrium with rs10518710, respectively
  misc_feature [331]..[331]: n is a, t, c or g
cacgcctgtaatcccagcactttgggaggccgaggtgggcagatcacttgaggtcaggggttccagaccagcctggccaacatggggaaaccccgtctctactaaaactacaaaaattatccaggcgtggtggtaggtgtctataatccctgttacttgggaggctgaggcaggagagggaggggaaggttggagtgagctgagatcacaacactgcactccatcctgggtgacagagtgagactctgtcaaaaggaaaaaaaaaaaagcgtgggtcatggatatttggggaagcatgtatggctttaagtatcatgttctcagaatggtntttggaattgacaatatctagaaaataaggtgataaatttgggacaacaaaaactttacttaaattaataatactatatgtcagagcgcataggaataatcatggcggttaactttatacccatttctcagatatggaaacttatattcaggtaggttaattgcttttggataatggcacaaggttaatgagaggagggaggctgggacaaaactgggctccctattcttcttctggtgtagtgtcactatactgaacagtgtatatagaagccagggatcatattgggctggcagaaggggaagtgacaaattgtggtcaatgtaaggt

SEQ ID NO: 4778 - DNA, 661 bp, Homo sapiens
  misc_feature [331]..[331]: Chromosome 15, SNP identification no. = rs8031971
  misc_feature [331]..[331]: allele = c, in linkage disequilibrium with rs10518710, respectively
  misc_feature [331]..[331]: n is a, t, c or g
actacaaaaattatccaggcgtggtggtaggtgtctataatccctgttacttgggaggctgaggcaggagagggaggggaaggttggagtgagctgagatcacaacactgcactccatcctgggtgacagagtgagactctgtcaaaaggaaaaaaaaaaaagcgtgggtcatggatatttggggaagcatgtatggctttaagtatcatgttctcagaatggtatttggaattgacaatatctagaaaataaggtgataaatttgggacaacaaaaactttacttaaattaataatactatatgtcagagcgcataggaataatcatggnggttaactttatacccatttctcagatatggaaacttatattcaggtaggttaattgcttttggataatggcacaaggttaatgagaggagggaggctgggacaaaactgggctccctattcttcttctggtgtagtgtcactatactgaacagtgtatatagaagccagggatcatattgggctggcagaaggggaagtgacaaattgtggtcaatgtaaggtccatgcaagccattgagcacattttccgggcatgggctcaggaaggcagaaatgtgggggatgcaagacctagaactcatttcaaacactagctgaatggtgctca

SEQ ID NO: 4779 - DNA, 661 bp, Homo sapiens
  misc_feature [331]..[331]: Chromosome 15, SNP identification no. = rs689856
  misc_feature [331]..[331]: allele = t, in linkage disequilibrium with rs10518710, respectively
  misc_feature [331]..[331]: n is a, t, c or g
agatgaggatactggattagagtgggccctaaatccaataactggtgaccttacaagacaatagcaacagagtgatacacaaagaggagactgccgtgggaagatggaggcagggattagagagatgcacccacaagccaaggacgccaaggattgctggcaactatcagaagctaggagagaggtctgggttggtttcttgctcagagacttcaaaagaaactaaccttgctgacaatttgatttcagacttctggcctctggtactgtgaaagaatacatttctgtggccttaagccacctggtctgtggcaatttgttacagcaaccntgtaaagctaatacagactatatcctcatcatcaccattattatcataactaatatttatgtagactctattcccaaataaggtcacattttgaggttccgagtacagagcaatttggaggtatactattcaacctgttacatgatcataaaaacaaaataaaaatatagtcataaaaataaaaacccaaagaaatataaatcattctactatagagacacatgcatatgtatgtttattgcagcactatttacagtagcaaagtcatggaactaacccaaatgcccatcaatgatagactggataaagaaaatgtagtacatatacacc

SEQ ID NO: 4780 - DNA, 661 bp, Homo sapiens
  misc_feature [331]..[331]: Chromosome 15, SNP identification no. = rs17545973
  misc_feature [331]..[331]: allele = t, in linkage disequilibrium with rs10518710, respectively
  misc_feature [331]..[331]: n is a, t, c or g
gcagtgaatgctcacacagttgtactgggctccaaccttaaccaaaaatcaataatcaccaaagtattacaatatgaagtgactgaatcatgggaggcagtggtggagggagagaacatatgtgtgaagctttgtaaatgctaagaatgaggaacgtgggctatttctcaccatcttaagatttctaagataagtgtgttagagacaactaattgaatgaagtagagtcagagaatcccagacacaccccatttcattaatgtacagtgtggcagatttttaaaatgagcttccaacttctgtaaaatggagaaatgaagtcactcgcttnatttcaggctcaaattttgagtccaaggagtaacattaatttgtgtatatcttattatcattaacttagataatcggataaacagcaactgtgtcataggacaaatgatattcttatgacgaggtttcaaaaatatcctcgtggccagattttaaaataactgagtgaagcgtcatcattttttccagattagttcaaacaaagtccctgtctttctttcctctgagcagtgagaaaatgctcctcttccaagaagacttctttgatccattggagttaagggaaggatttcctcctctttaggcataaaaaccaattgttttcaggcaa

SEQ ID NO: 4781 - DNA, 661 bp, Homo sapiens
  misc_feature [331]..[331]: Chromosome 15, SNP identification no. = rs1508023
  misc_feature [331]..[331]: allele = g, in linkage disequilibrium with rs10518710, respectively
  misc_feature [331]..[331]: n is a, t, c or g
tgtatatataatacaagagcctataaaatactatattacacatttagttgtcatatctatttagtctcctttaatctaggaataatttctcagccttttaaattttttttgacatttttaaatagccaaggctaatttccttatagagtgtctcacaaaaaccaagctggtatcagagagctctccttcccattcctgttcctttactatatttttacttatttctgtaggtacaattttatattttatgatttatttctccctgtgtatctataagagtagatagataggtaattgatagatatagatatttccatagtttgtctttttntatatagaaagttatagtatactatacatgcactcttctgtgctttgcttttttaacaaataatatattcatatcaatttatagagatcattctcatccttttggatggttatataatatgctattgtgtagatgcaccatggtttattcaaccaaaatctagtgagaggtttacaggttaattccaatattttgaagttaccataatgctgtaataaataactttatgcatatgttgttatagaagtagatttttagggtgaactatcaatttttgaggcatattgataatgctttcatcaagatgccatttgtgtatttcatgatatt

SEQ ID NO: 4782 - DNA, 661 bp, Homo sapiens
  misc_feature [331]..[331]: Chromosome 15, SNP identification no. = rs7168646
  misc_feature [331]..[331]: allele = g, in linkage disequilibrium with rs10518710, respectively
  misc_feature [331]..[331]: n is a, t, c or g
ttactcatagacatcaacaattcgtcacagaagaattccatcctgggaaagcagactttaaatgaaaagtgtttttctgagtcttcagatttctatactgcactttgaaagactggataaaatggacaatgaaaatgttcaccatctctaagcaggacatgaaacatagatgccagaaagtagatttcccccatcatgcctcgtatcgagttcattcaagatgtaattggaaaaaatacaactatttcagaacagacacgagtgcttgtcttgggaagggggtgttttataatgttatagactttttttccattgacactcctcattcttntctaataaagtacaatgctacaacttttgtaactcatcgaaataattaaagtggacacactgccatcccatgaatgttatatcaacaattaagtgtgaaaaatgatgccgggtctgggaagtaggtcctgcacattaccattattgtgtgctaatctgtttcattcatgaactaaccagaagcaacaagaaaagcttgagatttgaggcctgaattctggattttcccttttagggtagaactgacttttggctggagattctttccacactgttcttagtgttcagcaaaaacaaaaacaaacaaacaaacaaaaaacaaaactcctca

SEQ ID NO: 4783 - DNA, 661 bp, Homo sapiens
  misc_feature [331]..[331]: Chromosome 15, SNP identification no. = rs17628504
  misc_feature [331]..[331]: allele = g, in linkage disequilibrium with rs10518710, respectively
  misc_feature [331]..[331]: n is a, t, c or g
cttgctctacctgcagttaccaaatgaaggtgattctcaaggttccacattggcatcagtaagctgggtcatttactctccaggaagtaaattagaacgcaccagagggtttttataaagtccctgccaagtgtaatcaccgctccttgtgcctctaggtgctcagcgtgtcacatttcccactgacatcaggcataggagagtgcatttgaacctcagggatctgaccaaagcttcccagggaatgtctttcaagtttccacttttatcttaaaagtgtttgtaaaatttttattctacttcatgttatacttgttttcatataaaggtntgtcttaagttggttacttttgagtcaaactgatgctccagaaaaatgtctatttggtgccttggcaaagtcctctgcacatccccatgtacctctgatgattgagatacatgcatgtatagtatttttacatatatttacatatctatgtaaaatgtatgtacacatgtgttaaaatatatatgtatttttttttttgaaaatgggaacatctcagcaacagtgcacggtggggccattgctgaaaatatgattgtatgattgcttcattaatggggaagggaagatgcctctggagaccccaaagcaggtttctggaggtggggcaat

SEQ ID NO: 4784 - DNA, 661 bp, Homo sapiens
  misc_feature [331]..[331]: Chromosome 15, SNP identification no. = rs3803494
  misc_feature [331]..[331]: allele = c, in linkage disequilibrium with rs7174619, respectively
  misc_feature [331]..[331]: n is a, t, c or g
tgcaagacttctgtgaatggtatcaatagtaagctgggaaaactggaaagagaagattctggaagagaacacattcaagacccaaatatcaacttctgtcaggcccacagccctggcttttcctccaaaaacaaaaagaaacaagcagaaatctcatcctcaatgtactgctttctccatagaactggcttgtctgagttccacataacacattattctttgcaacgttagaggccatttgtcatttgccttcccattccctctttagccaaagcagacaacactgtctgccagagatctgtaaaaaacttagcccatgctgactgccccnctcctgaccaggcagctctttattctgagtgtatgtgggccctacctgaagtgttagccactgtcctggatgaagcaggcaaatgcgcggcgcccagagctagtgatgcctgagtgtctgtgcacagtcattctgtgctggctgccagaatcacttggggagtttgtataaacacagtttccagtgttttgccttgagtctcctcctgggtaggaaagcttatcctcctgggtaggaaagcttatcctcctgggtaggaaagcatggtgaggagctatgtgatgcacacaactcatacatgcagacctcgtatcgggtgggcaggcctga

SEQ ID NO: 4785 - DNA, 661 bp, Homo sapiens
  misc_feature [331]..[331]: Chromosome 15, SNP identification no. = rs11633212
  misc_feature [331]..[331]: allele = g, in linkage disequilibrium with rs7174619, respectively
  misc_feature [331]..[331]: n is a, t, c or g
caacatggtgaaaccagtctctactaaaaatacaaaaattagccaggcatggtggggggcacctgtaatcccagctacttgggaggctgaggcagagaattgcttgaacctgggaggtggaggttgcagtgagctgagatcgcaccactgcactctccagcctgggcgacagagctagactccatctcaaaaacaaacaaaaaatgctttcatactcacacttatggtttattacagtgaaaggatacaaataaaaattagcaaaaggagaaggcatatggagccaagtccaggagaaatcaggcacaggattctagggatcccctcccantggagttgcacagggatgtgcttaattctcccagcaacaatgtgtgatgatacatgcttccccaccagggaagcatgccagagccttggtgtccagagtttttactggggccagtcatagaagcatgcagcacctgtgtgactgacctctagtttctcccaacccaacctcctctaccctccagcaaaaacaggcattcaccctgaatactgggtggtctatgttctcagacatacaaaaacactcttatcaggacagtattccaaggacccagaggttacctcccaggagcctccaagggtcagtccttgaggcaggcctttctctgga

SEQ ID NO: 4786 - DNA, 661 bp, Homo sapiens
  misc_feature [331]..[331]: Chromosome 15, SNP identification no. = rs7169622
  misc_feature [331]..[331]: allele = t, in linkage disequilibrium with rs7174619, respectively
  misc_feature [331]..[331]: n is a, t, c or g
cacttatggtttattacagtgaaaggatacaaataaaaattagcaaaaggagaaggcatatggagccaagtccaggagaaatcaggcacaggattctagggatcccctcccagtggagttgcacagggatgtgcttaattctcccagcaacaatgtgtgatgatacatgcttccccaccagggaagcatgccagagccttggtgtccagagtttttactggggccagtcatagaagcatgcagcacctgtgtgactgacctctagtttctcccaacccaacctcctctaccctccagcaaaaacaggcattcaccctgaatactgggtggnctatgttctcagacatacaaaaacactcttatcaggacagtattccaaggacccagaggttacctcccaggagcctccaagggtcagtccttgaggcaggcctttctctggaatatgcaaggtttgagcatcgcaggcctgctgagttagctttttcttaacccttccctgcctactcgggtttaacttgtccttttaagttgctacttttcttagaatgattgaattcaagtcaaataacaggttcttcacattgattctttttcctgctagggtgcttattgaaatatggaagacaatatttgggcttggtttgaaagatcaggagag

SEQ ID NO: 4787 - DNA, 661 bp, Homo sapiens
  misc_feature [331]..[331]: Chromosome 15, SNP identification no. = rs7174619
  misc_feature [331]..[331]: allele = c, t
  misc_feature [331]..[331]: n is a, t, c or g
ccaacccaacctcctctaccctccagcaaaaacaggcattcaccctgaatactgggtggtctatgttctcagacatacaaaaacactcttatcaggacagtattccaaggacccagaggttacctcccaggagcctccaagggtcagtccttgaggcaggcctttctctggaatatgcaaggtttgagcatcgcaggcctgctgagttagctttttcttaacccttccctgcctactcgggtttaacttgtccttttaagttgctacttttcttagaatgattgaattcaagtcaaataacaggttcttcacattgattctttttcctgcnagggtgcttattgaaatatggaagacaatatttgggcttggtttgaaagatcaggagagccctgtctccttccttgctttttattttgttttctttattttttactgaggtaaaattcatagaacataacatagccattttacattgtgcagttcagtggccttccatgtgttcatgtggatcagttcttccttcattttaattgccaagtaatattccatggtttggatatatcattttgtttatccattcctctgtttatggacatgggttgtttccactttttagctattatgaataatgctgctatgaatattcacgtgcaagtta

SEQ ID NO: 4788 - DNA, 661 bp, Homo sapiens
  misc_feature [331]..[331]: Chromosome 15, SNP identification no. = rs10851838
  misc_feature [331]..[331]: allele = g, in linkage disequilibrium with rs7174619, respectively
  misc_feature [331]..[331]: n is a, t, c or g
tgcactgatccttgccttctgcttccacatgtcctctttctagacttacagatgacaaacctagcattatatgttgatatcatgtttcccttttatccttgtgtatcatataataaaatctgttttcacctgggtaaatggcaccaccatctacccattgctcaagccaaatgcttgggagtcatcctgaagagcggcctttctctcgtcactcctcttcagtctgttagcaggtcctgtcttcttttcttcccatgacctatatctgtcctcctctttccacctccatgctgtcaccctagtgcgtaccccattgtctccagctgggcanctgcagccaccctcatacctggcctctggctttccctcctgccaacccctccccatagcccgtgctccacacagcactgaaggcagttatcttttgtgacactgtcctactgcagaccctccgtggccttcctgttgtgctttggaaaaatccagagttctctttgtttccctgccctctgttctggactgtatagtgctcccctcaaattcatgttgagtcctagcttccagtacctcagattgtaactgtatttggagataagacctttaaagaggtaattgaggccgtctgtaatcccagctactagggaggctgaggcaggagaat

SEQ ID NO: 4789 - DNA, 661 bp, Homo sapiens
  misc_feature [331]..[331]: Chromosome 15, SNP identification no. = rs11856837
  misc_feature [331]..[331]: allele = c, in linkage disequilibrium with rs7174619, respectively
  misc_feature [331]..[331]: n is a, t, c or g
tggcccgtgcttgctgggcctcagtttcctgatctgtagaatgaggctggataaatctaagtttctctccaactctacagtctgatggttctagtactacaagatcaagatttttttcctaaagagccatttgtcttattttagcttcaagccaagccagggcatctgagaaataccaagcctccgttgtgatgtgtcgccatgaaaatgttggctgccctctggatgcaagtctgcttgtgctgtgctgtggctcagagttaaatttagataaaaatcagttaggagctaagaatattcccagctttcctgacaggttgtatccatcatnatgggaggaaaaacaaggaactggctgcctggcgacagggagcgggccaggctgagtgtgaggtcaggcctcggctggaatctcacggacttgaaaggacagagacgtttcctgagatgtctgcggcagaatgtgggaggcttcagcctgaggaaagttcaagttggagagaaaggttgccagacctttgagtgacccacactgcttataacttctagaaggttcttttagggaaacctgcttagaatgaaaccctgaaacgtcctttgctgcctccttaacaacttgcattagagagtttcttcagccaaaaggcgaatgtctgttgag

SEQ ID NO: 4790 - DNA, 661 bp, Homo sapiens
  misc_feature [331]..[331]: Chromosome 15, SNP identification no. = rs16955436
  misc_feature [331]..[331]: allele = t, in linkage disequilibrium with rs7174619, respectively
  misc_feature [331]..[331]: n is a, t, c or g
gttgtatccatcattatgggaggaaaaacaaggaactggctgcctggcgacagggagcgggccaggctgagtgtgaggtcaggcctcggctggaatctcacggacttgaaaggacagagacgtttcctgagatgtctgcggcagaatgtgggaggcttcagcctgaggaaagttcaagttggagagaaaggttgccagacctttgagtgacccacactgcttataacttctagaaggttcttttagggaaacctgcttagaatgaaaccctgaaacgtcctttgctgcctccttaacaacttgcattagagagtttcttcagccaaaaggngaatgtctgttgagtggaaaggagaggacggagtcgatgttgtcccctgtgagatgtcatgtctcaggcagtatgctggacattcccgagacgccagctctgctcaggtgacttgtgtgccctgcccttgtaagcctcgaattactcatcgtgaaattgaggtcaagccactcactcacagacagggctgtggtaacaataaaatgaagggtgcttagcacattgaaaataactcaggcagtgttccattattgctatgggctgggcgtggtggctcacgcctataatcccagcactttaggaggccaaggtgggtgaatctcttgagcc

SEQ ID NO: 4791 - DNA, 661 bp, Homo sapiens
  misc_feature [331]..[331]: Chromosome 15, SNP identification no. = rs11858540
  misc_feature [331]..[331]: allele = g, in linkage disequilibrium with rs7174619, respectively
  misc_feature [331]..[331]: n is a, t, c or g
tctagtattgtttattgttgtgccctcctgggccaaacgaggaggggtgggagctgccctgggtgtgcctatgaggagggccttgtggtcttgtggagtcactcagatgtgctttcaatctgagctcccccacttcctagctataggacctttgttaaattcatctttgagtctcagtccccactcctcagaaatgggtatgacatgtactttctaaagctattctaagaatggcatgcagttgtcattaattaaaacacgcagcacacggtaggtattcaacaaacatggggaattgtgtatcatcgtcagtagaggatgctctcaaatnacactaactctgctaaaatccaggccaggattgtgattcgttgggaagccttggggaagttgcttcgccattctgaacttcagtttcttcttctgtaaaatggaagtaataacaatagtatcagctttctatagttactatgaggattagatgacataaggcatgtaaatccattagcagtgtctggcatgcagtaaacccctcaataactgttagcgctttccttcctgcccctctcaattcttccaggacccaggtgaagagaacagtcctatgctttgttccttctgatgtacaatactgtcatataaacccactcatttttttctc

SEQ ID NO: 4792 - DNA, 661 bp, Homo sapiens
  misc_feature [331]..[331]: Chromosome 15, SNP identification no. = rs1441361
  misc_feature [331]..[331]: allele = g, in linkage disequilibrium with rs7174619, respectively
  misc_feature [331]..[331]: n is a, t, c or g
ggagtaaactagacatggaatcaggaatcctagaaggagaaaaggactctgctcctggccttcaaatttgccccttaatttaatccttcccttaacagggaagtcaggtacccaaggtcacaaagttagactgcagcatgcctcggatttgaaccccggttgaagtcttgtgatgttaacattttatggcccgattgctgtcacaggcttaagatagggaccattcaacctgacagcagacgtctctctctctcttttgccatacctagaattatgcctgatatgcagagagtactcgccaaatatttgagtgatgaattcattaactgcnagctgagccctttaaacaagcttgtccaacccgtgtcttgtgggccacatgtggctcaagacggaatgtaaatttgtaaactttcttaaaacattgagatttttttacattttttttttttttttagttcatcagctattgttagtgttagtgtattttatgtgtggccccagacaattcttattccagtgtggcccagggaagatcggacacctctgcctttaagcttggtatctggtctagctcacctagactccatttgggtattccccccttttaggcctccctaatagtgctgttcctatggggaggctgggatgcttaggtgag

SEQ ID NO: 4793 - DNA, 661 bp, Homo sapiens
  misc_feature [331]..[331]: Chromosome 15, SNP identification no. = rs1473608
  misc_feature [331]..[331]: allele = t, in linkage disequilibrium with rs7174619, respectively
  misc_feature [331]..[331]: n is a, t, c or g
actcagaccaaggttgtaacatttttattctagaagttgaaaaacactgccctaaatcccttgattaaaaacattctagaagcttgagcattttgtggggagagggagacagtgtgtgaacatgcctcacatgtgctggctgagcaggggatggcctccatcactttatttcctcttcctaatggattgcaatgcgaaaggccatccaccgaggtgatctctccccaatgattgagattctttttttcattgactgtgttctgctgcagtccagcccctcaggtttggccttccacatcattccccgacaacccacccccatgcccttctncaagaaggatgacctcaagtgtgaaataatctccagcatctgtttggggctttgattttgtgggtttattttacacatcctaattctgcaggaaactccctgcagatgtggagaagccctcagttactgaccccttgttaaaagaaacagccagaaaccagaaacatgaccaggaagataaacagctgttgaggtctcagctgctctccagagtggcatcatcttcggaaataagccttgcattcatcttcaccgaggaaattgggccttgaagttcatttagttagagatggtaaaagcatggcacacatacctcccacccttctctcg

SEQ ID NO: 4794 - DNA, 661 bp, Homo sapiens
  misc_feature [331]..[331]: Chromosome 15, SNP identification no. = rs1473607
  misc_feature [331]..[331]: allele = a, in linkage disequilibrium with rs7174619, respectively
  misc_feature [331]..[331]: n is a, t, c or g
cagatttaacaaaatattatgaactcataataaagggtattaatgtatttgttatctaccacttccttccctgtatctttgggccctcaccactcagaccaaggttgtaacatttttattctagaagttgaaaaacactgccctaaatcccttgattaaaaacattctagaagcttgagcattttgtggggagagggagacagtgtgtgaacatgcctcacatgtgctggctgagcaggggatggcctccatcactttatttcctcttcctaatggattgcaatgcgaaaggccatccaccgaggtgatctctccccaatgattgagattntttttttcattgactgtgttctgctgcagtccagcccctcaggtttggccttccacatcattccccgacaacccacccccatgcccttctccaagaaggatgacctcaagtgtgaaataatctccagcatctgtttggggctttgattttgtgggtttattttacacatcctaattctgcaggaaactccctgcagatgtggagaagccctcagttactgaccccttgttaaaagaaacagccagaaaccagaaacatgaccaggaagataaacagctgttgaggtctcagctgctctccagagtggcatcatcttcggaaataagcctt

SEQ ID NO: 4795 - DNA, 661 bp, Homo sapiens
  misc_feature [331]..[331]: Chromosome 15, SNP identification no. = rs1031029
  misc_feature [331]..[331]: allele = a, in linkage disequilibrium with rs7174619, respectively
  misc_feature [331]..[331]: n is a, t, c or g
agctcgttttaacaggtttgacaggtttgtatgtcattcttagactctctcctacttcttacagaaaaattagattggggttaaatccatttactgcttcagacactgtatccaaattgccaaataagggaaaataagttgtaaattaaaatgatactttaaggaacagaaatgataaatttttagatttgggtttggaaagcacctcttacagaaatataacactttatgtctcttaaaaagtctaattcagtgatttgaacatgtggtacttcaaaacaaactcagatatggttccacgtggaatatagttcatgaccagtgataactncaaacattctggatactgatcttcaactttaagaaaaacaatcacactcaaattacttttttcccttaacagttaaaatgataaagtataaaattccttgctttaaatattgctaattagaaattttaacttttctataacttgaatttgaatctcttctgtttaaatgacaactgaatttcagatttaacaaaatattatgaactcataataaagggtattaatgtatttgttatctaccacttccttccctgtatctttgggccctcaccactcagaccaaggttgtaacatttttattctagaagttgaaaaacactgccctaaatc

SEQ ID NO: 4796 - DNA, 661 bp, Homo sapiens
  misc_feature [331]..[331]: Chromosome 15, SNP identification no. = rs11072274
  misc_feature [331]..[331]: allele = t, in linkage disequilibrium with rs7174619, respectively
  misc_feature [331]..[331]: n is a, t, c or g
catctcctagccatctgctcttgagtttctcctggtacacaaactaagcaaatcttttataacttcaaaatatcaaaatgcttctcacatgtgctctttgctcacatcatctgtggcaaggcttacaagctctaggacacagcgatctccaatgtcttattgagactgtcaccagtgagtggagatggtgttcgcgtggcctctctgctgggctggtgatggttctctatggccagattggacttgaaaacaacatggaaacaagtttcctttctgcaacacttctcccaacttggtccatgcctttgctttttatctccctactcccttncaggggccatatagattcagaagtcaattaccaaataatggtaatgtgtttacccttctctgcatttaggaaacccactaccttctgtcatttggctttaccatgcacactttgcctgccctggttcttttcaacactccttgatacacttgtgtaaaagcccctctgaagaaccatgtcaaccctgtactctcacatctgtcctttttggcttccaaagtgagccttttaattaaacaaaagaaaagactgccatgtccatttatttttggcagattcgtgattccatcagagttgatgctttcctgtcctctttgtcctctttgtctt

SEQ ID NO: 4797 - DNA, 661 bp, Homo sapiens
  misc_feature [331]..[331]: Chromosome 15, SNP identification no. = rs1021070
  misc_feature [331]..[331]: allele = c, in linkage disequilibrium with rs1564499, respectively
  misc_feature [331]..[331]: n is a, t, c or g
tcttttagggtgctggtaatgtctgtgtcttgagctggatgctggttacacaggtgtgttcagtttgtgaaaattcatttagctgaacatttatttgtgaactattctatacatatatctcaattaaaagtttttttaaaaaagctctttcaccagaccttagatgagtgctgtagttacagacagtatagggatgatctggactccggaatctgcctgtctggatttcacattgcctatttttcacagcacgtacacggaagatactcttgatctccctacttaacagatgaaaaacatgaggcacagagaggttaaagagtttgcccanggttacacagctaggaagctgcagattgcaagcccaggacacatgatgctgtgactcacctctgcagtctctcctaatccaggctttacctgatacacttagcatagtgctcagcagatgggaaagcactgaatgcatgttctttgcggtcattgttattgtttaaggtgtctccattgaaaatacttccaacaaaggaaacagaaggaaatcagaccccatcagggcagacttaaaaatcaacatctgcccttacgtggagcacccagcaatgttacctcaattctctttgagtattaggctttcccagcaacgtgccaaaaccctggt

SEQ ID NO: 4798 - DNA, 661 bp, Homo sapiens
  LOC390612
  misc_feature [331]..[331]: Chromosome 15, SNP identification no. = rs12910237
  misc_feature [331]..[331]: allele = c, in linkage disequilibrium with rs1564499, respectively
  misc_feature [331]..[331]: n is a, t, c or g
tgctggtcttaaagttctggacttaagctgcctgcctcagcctttcaaagggtttggattacaggcatgagccactgcaacaacaacaacaaaaaactctcaagttttttttattttttttaattagctgggcatggtgatgcacacctgtagttccagctactccagagactgaggcagaaagattgcctgaatccaggcttcagtgagctatgattgagacactgcattcctgcctgggtgaccaagcgagaccctgtcttaaaaagggaggaggaagaggaggagaggactaaaaccacaagacacctctttttcctgctgaattggnagagataaaaaagatataatgacagctggacagggaagagtttgagtaaacagacacttatccactgctggggctgtaaactggaacaactgttctgtagggccaaagccctaaaaatgccccatctgtttgtaccagaacttttatttctagaaatagatcctgaagaaataatcagatgtgcaaaatgaatgcatcaatatgcatcacagtcgcactcacacatggaatattgaaactgcctaaatgtgcacccatgaatccaaacaactttcttcttgctcacccatcagtcacccaagtccttcagtcaagttttaaaaaccaaag

SEQ ID NO: 4799 - DNA, 661 bp, Homo sapiens
  LOC390612
  misc_feature [331]..[331]: Chromosome 15, SNP identification no. = rs922691
  misc_feature [331]..[331]: allele = a, in linkage disequilibrium with rs1564499, respectively
  misc_feature [331]..[331]: n is a, t, c or g
gtccttggcctaataccgtctggcagctcatgcctcaatgccaaccccagccccatggcctcacggccagaaatccaatttactgaagcttaattgagcccctgactccctggagcattggccctcaggctctcctgctccactaacagcagatttcccggtgattaggaaaggaggaaaaaacagcaggagccaagttaatttcaattaccctcatttcctccctggagcagcacacaccccttgctaagtgcgtctttatgtcagctgcagtggaagctgatgagtattaagtattagagctctgggtgccccagacaccttgcatttnatctgctgactccagagagcagactgtccccccgcacctgctggtcctcagcatttagtcctattttacggagcccagagaagcaagctcagatacagtcaatgcccgtgtgggaaaagggcggaatattttaacagtcttttcagataattgcggataattttcttaaatactacatcaaaactcaacaagtggtacttcttaaaggttaattgcaatgtggattcggaaaccatatcgatgaaatttcagtactttgtgactctaaaatccattgatctatcttgcacttcagatggattttttacctatgcatgattttgtaacatt

SEQ ID NO: 4800 - DNA, 661 bp, Homo sapiens
  LOC390612
  misc_feature [331]..[331]: Chromosome 15, SNP identification no. = rs12905641
  misc_feature [331]..[331]: allele = c, in linkage disequilibrium with rs1564499, respectively
  misc_feature [331]..[331]: n is a, t, c or g
ttaatactcatcagcttccactgcagctgacataaagacgcacttagcaaggggtgtgtgctgctccagggaggaaatgagggtaattgaaattaacttggctcctgctgttttttcctcctttcctaatcaccgggaaatctgctgttagtggagcaggagagcctgagggccaatgctccagggagtcaggggctcaattaagcttcagtaaattggatttctggccgtgaggccatggggctggggttggcattgaggcatgagctgccagacggtattaggccaaggactgaccagatgggcccagtagctaattcaatctggcttnccagaaacaggacttggaaggccagagctatgggcctggacagctgtgactccagctgggagggcaagatcttatgtggcactgggcccaccctgtggctcgtctcagggagtcctgtgcccggcatctggcctcagccagctgtgcactaacaatcctgataaccagtgataagtggcagtttagtgctagggaaaaagcccagcctggggattgggggccagggctgtgggctccacacaggtatcagcttgctctaggagtgaatttaggtaagtctcattctctaggactaacattcttgcttctatgggctgccatagtcttaaa

SEQ ID NO: 4801 - DNA, 661 bp, Homo sapiens
  LOC390612
  misc_feature [331]..[331]: Chromosome 15, SNP identification no. = rs8038920
  misc_feature [331]..[331]: allele = g, in linkage disequilibrium with rs1564499, respectively
  misc_feature [331]..[331]: n is a, t, c or g
aagctcagggagtgacagatgggtttggtgacattcaggaaattatgcagacctgctcagtcctgggcctggggccctgattcatggcaggccttgggaagtcaggggccagggagggaggacaaatgtgaattaatgatcacaggagtgtgttccaccagccccctttggaactcaagggccctttaaataaagcagagtgtagatgggtttcctgaggcttctcccaccccagggctgccttgtgcagggaggtggaggaggaacttccccggactccataaagaatatgcagagtggaacctgctctgtcgcttgcttgggcaaatcncttctcctttctaagcctcaggttcctgtctgtgaaacaggataaaccacctctcctaacagtgtggattcattgagatcatgggtggaaattcacctggccatgcttgatacaatatgaatgctgaatatagctagcaggccactgtcctcactgccctgggccaaatgaaaagcatgctgaaatagagaccccagcgtgggggcagtggcaggaaggataaaacagtcacccacccctgaacccacacccccagggaggtgcctgcaggaggaggcattgaaacaggaacctggagaatgagaaagacttcagaaggaagagaaaggg

SEQ ID NO: 4802 - DNA, 661 bp, Homo sapiens
  misc_feature [331]..[331]: Chromosome 15, SNP identification no. = rs1964562
  misc_feature [331]..[331]: allele = c, in linkage disequilibrium with rs1564499, respectively
  misc_feature [331]..[331]: n is a, t, c or g
acagtgaccctgcatcctggcagagaacaaggatgcttccaggcagtggtggggtgggcacacatctgggagagctcgcccaagcctgccccaagcaaaaaagtttcccagccccaggcactggcagctggcctcctgcacaacccaggcaggtggaggagacaccaggagcactggccatccccaaggaggccatggttttcagctgtccaagaccgttcacactgcggctgcaccactgccctgcaaagcacccccgaaaacattcctccatcccctcaaccaaggccagcccaggcgtgggcctgctttgcaatatgacggtccactntttacttggaatcccatcccatcgtacttggtgaatgatttccacgagtcaagaagggcattccacagaatctcatggagccatgtcaggcatggggcaagctggggacagagcagcccagtgatctgcaaacacaggctggccatgagaagtgagggtgggtgtctgggcagccaggccctccccatgcaggctgggagccactgttggaagagttgtgtgtggaagagcacaggctattctagaaatggggcatggctggcagcttaaagccaccagtgggaggttcacgggctttctacagtggccatttctgaacaaaggatgtgc

SEQ ID NO: 4803 - DNA, 661 bp, Homo sapiens
  ADAMTS7
  misc_feature [331]..[331]: Chromosome 15, SNP identification no. = rs1994017
  misc_feature [331]..[331]: allele = c, in linkage disequilibrium with rs1564499, respectively
  misc_feature [331]..[331]: n is a, t, c or g
agcctgggcaacacagcgagactctgtctcaaaaaacaaacaaacaacaacaacaaaaacaccagaacaaatgaagagaacatgaaaaaaaaggagaaagcttcgtatttcagttcccttaatggccccttcttcctgtctctgaccggaccttgtggctgtccctcacctcctccagcttcatttcctacgcagcctttgctcccatagccttgctcagggttccgccgttccctgaaagctctcccgctcctttaccgctacaggcctttctcaggcttcctctaccaagaacaccattcttctcccttctgcacatgtgtgaattctngctcctcctccaagttcaagcctccttccaggaggacatttgggatgccggcaccacatctttgccaggtgcccctctgtttccctctaccctggccctgcagtgtgactgtctgcatcacccccattagaccttgacctcatgtatcaagatcttgcccctctgcttccctctaccccggccctgcagtatgactgtctgcatctctcccagtagaccttgacctcatggatcaaggtataggggcccagggctgggggacttactcaaggaacctggtgatatactggcggctgcagcgggaccaggtgaggggagcggcgtcgtaca

SEQ ID NO: 4804 - DNA, 661 bp, Homo sapiens
  ADAMTS7
  misc_feature [331]..[331]: Chromosome 15, SNP identification no. = rs12905740
  misc_feature [331]..[331]: allele = c, in linkage disequilibrium with rs1564499, respectively
  misc_feature [331]..[331]: n is a, t, c or g
tgcccgagctcgtgggctacagtgaaggccagcggcaggcccgtgtcctcgttgatgctgcagctgcggtgcggctggcacatgcccgccacatgggacagtcccagggtctcacagggccggttcatggctgcacacaggtcctttctgcacaggcaaagaagcagccttcaggctaacctggcccagtgccaggcccacctgagctaaggccagggaagggtccccccgaattgatcccaagcgaaaaggatgtctctcccaccgttctgtgacatgaggccagcacggtggccgcttgggaagcaggtgctctcatttacacacaacnggctgggcatctctttggcccttgagagcacagacccgcacagaacaattttggttactatccagcaggggtgctgacagatgcctccagagtccagcagagggaaaataactgcctctggacagatcagcagttgccggaggttaggggaggaaggtggctgtgactataaacgggtagcatgagacatccttctgatgggacagatctgtatctagactgtgggggtgggtaggtgaacccacaatgatgaaactgcaaagaactgaatacacacacacacacaaagggaagtacgtgtggaactgatgagatctgagtaagtctgtg

SEQ ID NO: 4805 - DNA, 661 bp, Homo sapiens
  ADAMTS7
  misc_feature [331]..[331]: Chromosome 15, SNP identification no. = rs1564499
  misc_feature [331]..[331]: allele = t, c
  misc_feature [331]..[331]: n is a, t, c or g
tgtcgcccaggtcggagtgcagtggtgcaatctcagctcactgcagcctctgccttcccgggttccagtgattctcctgcctcagcctcccagggggctgggattacaggcatgcaccactatgccgagctaatttttgtatttttagtagagacgggtttcaccatttggccaggctggtctcgaactcctgacctcagaggcaaggggaggtcagagaggaaggcagggaccagatccaagaagcctgttggctaggctggggacttctgtccttttcctggacagtgaagaaccacttactgccttaggcaaaggcatgtcatgatgnggtttgcatttcaaagatcgatggtggagctgctaggctgcaggtggtctggaggggccgcagaatatggggacactcgtaggagacctcaacaactgagcagacgaaatgatgatggtaacttggacgaggcagtggtgttggagatggagagaagagacagagtcgggcaaaacttgggaggcaaaaattggttggttgtattggagaaaggtggttcaaggctcccgggctcccagcctgtgtgtggaggtgacggtggcacatgatatcgctgtttatcttccccatttctgaccttgggttctgagagtgtcattcatccccata

SEQ ID NO: 4806 - DNA, 661 bp, Homo sapiens
  ADAMTS7
  misc_feature [331]..[331]: Chromosome 15, SNP identification no. = rs2904228
  misc_feature [331]..[331]: allele = g, in linkage disequilibrium with rs1564499, respectively
  misc_feature [331]..[331]: n is a, t, c or g
cactgcagccgctgcagcctccacctcctgggctcaagcaatcctcccacctcagcccctcaagtagctgggactacaggtgtgcaccaccatgcctggcccgttttactttttttaaccctgtgtggccaaacttattcaacagcagcatctttttttcacagtgcactactggcattctttggaacacactccctgaaatattccttgggaaatgctacaatgagacagagtccccaagtgtaggatcatgctcttccacatccatcactttatcccaggtagagcgatggctctcaacaagtcagtcttaaataaacatctgatcccnagggaacatctgttccccatccttctggcccaccccggccaccatggcttcccagctgcccctctccagggcaggttaaggggcacaggggacagaatggggctttggaggtagacagacctgagctccagtcccagctgtaccacttactagctgcgtgaccttgagcgagccccttgacctctctgaatctttgtttcctcaacttgaaaatgggggtgagggccgggagtggtggctcaagcctgtaatcccagcactttgggaggacgaggcgggcagaatagcctggccaatgtggtgaagccccctctctactaaaaatacaaa

SEQ ID NO: 4807 - DNA, 661 bp, Homo sapiens
  ADAMTS7
  misc_feature [331]..[331]: Chromosome 15, SNP identification no. = rs3743057
  misc_feature [331]..[331]: allele = c, in linkage disequilibrium with rs1564499, respectively
  misc_feature [331]..[331]: n is a, t, c or g
gggaatctcaagatcagaaaaggaaagtgaccaggcagagccacacagcacagatctgggacagagccaggaggcgaattcaggcccctggcctctgatccctgtgtggttcccagtgccccagagagagctcactgaggagaggccctggagacgtgtgccctgggcctgtccactggcagctaactccaccccatctgggcctccagtgtacccagagctggagtctcgacgggagcgttgggagcagcggcagcagtggcggcggccacggctgaggcgtctacaccagcggtcggtcagcaaagagaagtgggtggagaccctggtngtagctgatgccaaaatggtggagtaccacggacagccgcaggttgagagctatgtgctgaccatcatgaacatggtgagtctgtgtgggccaggagcgggtggcggggatggtgttggggggtggggtgcaaagagtgggtgcagggcaggaaggctgtcaggctggaccccagacccaggtctaggccccaagtaggaagaagggtatccaagctcctgaggccaggaaggggtgggggtcttggcagctagtcactatgagagagcctgggcagagggctgctgtggggacaccatagggtgtcatgccactaggagggggagcagg

SEQ ID NO: 4808 - DNA, 661 bp, Homo sapiens
  ADAMTS7
  misc_feature [331]..[331]: Chromosome 15, SNP identification no. = rs8038189
  misc_feature [331]..[331]: allele = c, in linkage disequilibrium with rs1564499, respectively
  misc_feature [331]..[331]: n is a, t, c or g
tgtgtggtaaaccctcagagaagtggggaaaagccagaagtaagaaagggcaacaagaagtttaatcttggtccaggcatgtgttttgtaaaatgggaggcaatggagggacaaaataatgcactatagagcatgggctttgaaagtaacaagacccagggcaggcccaagtgggccacttaatagttgtataatctgagtcactgcatatctctgggtttgtttcctcatctgcttggagaatccaggccagaaaacgtaaggaagggagcccaggtcaaggagacgaaaatgacagagatagggaagaactacttcccaggttcactcncagtgggagatttcctaactttcccaaggatcacagttcgtggaggctacaactccaaggcttgtttttgttttgttttgtttatgtttttgtttttttgagagagagtttcgttcttgtcccccaggctggagtacaattgcatgatcttggctcactgcaacctccggctgctgggttcaagcaattctcctgcctcagcctcccaagtagctgtaattacaggtgcaagccaccatgcccaactaatttttgtatttttagtagaggtagagtttcgccatgttggccaggctggtctcgaactcctgacctcaggtgatccacccg

SEQ ID NO: 4809 - DNA, 661 bp, Homo sapiens
  ADAMTS7
  misc_feature [331]..[331]: Chromosome 15, SNP identification no. = rs922693
  misc_feature [331]..[331]: allele = a, in linkage disequilibrium with rs1564499, respectively
  misc_feature [331]..[331]: n is a, t, c or g
ctggctctagagctcactaatccgaatgcttttcacctgcggcatagctctacttagccctgtccacatttttgaacttaataggatgcttctttgtaagtcatctggaatttctgtcttgcaatatttgcccaggatctacagcaggtattctcaacaggactgtacatccgctggggcatgggttcttccccagagatactttattttttttaagcttttggggccttttctccccagtggttgattcctcagttacatacctgcttccattccccaaccacatgcatttgaggacaaaacttgcctaaaagagtgtcatgtagctccnccagttgagaattttagagctggttggcatcagtgcccccctgaccttcagctcatctttagctgccttggctgggattgtccttgccctgggaaccaacgttaatactcacttaaaacaagtgttggagggtgggcatggtggcccatgcctgtaatcccagtactttgggaggctgaggcgggtggatcacctgaggtcaggagttcgagaccagcctggccaacatggcgaaactctacctctactaaaaatacaaaaattagttgggcatggtggcttgcacctgtaattacagctacttgggaggctgaggcaggagaattgctt

SEQ ID NO: 4810 - DNA, 661 bp, Homo sapiens
  ADAMTS7
  misc_feature [331]..[331]: Chromosome 15, SNP identification no. = rs7182809
  misc_feature [331]..[331]: allele = c, in linkage disequilibrium with rs1564499, respectively
  misc_feature [331]..[331]: n is a, t, c or g
ctagggaatttgtgtagtacagggtcacctacttcctccatctcatctccagtgaccttccactccacctcagccatcaggtctcagggccaaagcctgggctgtgtcatccctcagaactgctccatcttggaaatccgaagctcaggtgcccccctgtcagacccgactctgcagtcctttccaccttcacagtcccactatgtattgctcttcctccagtcccttgataccttcctcttcgcccaacctaccagcccctcctggcttcacctacttccctcccagctacatctactgcttgactcctggcccctacccaaccaccttncatttcttccccactgcttacaccagctggtcttgctgctcagtgacatggacaattcagaccaccacatcctaccatgcacactgcatacaatgagcctttgtagctggcacccactcacttctccctccatctggacacagtgaaacaggtgccctccagcagtcagagacaatgcttccaccagggctctgtggctccctcccctcctgtctcctcaaaggtcctgctccaggtgtcccccgctttccttggtctccttgggttggtgaccgtcagtctaaaaacattcttgtcttcctcctattaaagatactgataatagctggg

SEQ ID NO: 4811 - DNA, 661 bp, Homo sapiens
  misc_feature [331]..[331]: Chromosome 15, SNP identification no. = rs1383636
  misc_feature [331]..[331]: allele = a, in linkage disequilibrium with rs1564499, respectively
  misc_feature [331]..[331]: n is a, t, c or g
aaaaagtactgataatacccctccatggactgggtgtcccctctaattcccaccccacatatctgctccctgtcttagtcaaacttctccctcaaggttgtctagattcccccttttcccatttgtacctcaggctaagcctcttgtccccccatcttggtgtcaaagccaaattccttctccaccttgacctgcacagtgcattctagagataccctccctgttcacatacctccactctgccctcatcacctggcacatctcttcttcactccataagatcaagtatgcactgcagacccagggcactggggacacagctgtgaacagntggataaggtctctgttccctggagctcccactctggaggaggccatggacagcaagcaaatagacagatggataaacaattcagaccaccatataaacaagaccagctacagagaggtgctttgaagaaaataaaaccggaagtgactagagtctactttccatggggtggtcagggaaggccttcctaaaaaggtgacatttaagctgtgataccagaatgacaaaaaggagccagtcatgtgaaggtgaaagggagaagatgtgagccaggcatgggatgcatgcctgttgtcctacctgctcaggagaatgtggagggaggatcct

SEQ ID NO: 4812 - DNA, 661 bp, Homo sapiens
  MORF4L1
  misc_feature [331]..[331]: Chromosome 15, SNP identification no. = rs8029659
  misc_feature [331]..[331]: allele = a, in linkage disequilibrium with rs1564499, respectively
  misc_feature [331]..[331]: n is a, t, c or g
cctaaaccccgaaaaaaaccaccacattagcattttcagtatattttcatatctcaacattacagttatggaagatgttttcagttatcgcattcttatttcttcaaaattagggtagttattgtattagcagccaagtcttgtttgtcctgtaatgtcatagaacgtgacatttaaagtgttttgtttcagtacagttggtttcctttgtactagtgtgtgttttatgtatttatgaaactattaggctcgtagggtttatcagactgtcaaggcacaaaaagttaatcgctgctgtgggaacaacctaaggatggctgttctggaagangcgctttagttctagagggttgctagttaagagaggagtagcagcagagatttccttgtgccgttttaagtggggtaattggagaagagtaggaaccaaggtatccccaggtaagggtttgaaagctgtgtaagagagtctgtatttaacattactttccaggtgtgttttgtacttgtgtttaaaatggaattgtgtaaccacgttttaaaaatgattttagtgggtggggcacggtggctcacgcctctaatcccagcactttgggaggccgaggtgggtgggggcggtggatcacctgaggtcagcggttcgagaccagcctggtca

SEQ ID NO: 4813 - DNA, 661 bp, Homo sapiens
  MORF4L1
  misc_feature [331]..[331]: Chromosome 15, SNP identification no. = rs17243470
  misc_feature [331]..[331]: allele = t, in linkage disequilibrium with rs1564499, respectively
  misc_feature [331]..[331]: n is a, t, c or g
taaactaacttttcagaaacaggtccatttactgcctttcataagctaatgaagtttttttataatatagtttaaagactttgctttagaggaatttgcttttgaaataaatatagctcctggctgattagactgagaagacacaagcatagctttcattagctgtccttggatagcttttgtaatccattgattaaagatttaaggtgaccttttatgcttgtggttctcagctttgttggaccttttgtgactaatcttcagttttgtaacttgagtattctacaagcttagtgttcttagtcattctgtttaggccaccataaagctngtgtagagtgtctttgaaggatgatttgaaaaggtagtgtctttaaaaaatttctaagtgaattattattttttttttgaatttcagtgtgtaaaggttgccataaaggacaaacaagtgaaatacttcatacattacagtggttggaataaaaagtgagtattagatcttacaattctatttgtaattaacaagatagcttgtgtcactgactggcttagcaagcatatgcttttcaattctgcagttttaatgtaatatagtacatattgaagcaaaggtgaatcatttgtagtatgacaaaactattagaaattagggtactgagcc

SEQ ID NO: 4814 - DNA, 661 bp, Homo sapiens
  MORF4L1
  misc_feature [331]..[331]: Chromosome 15, SNP identification no. = rs17832351
  misc_feature [331]..[331]: allele = a, in linkage disequilibrium with rs1564499, respectively
  misc_feature [331]..[331]: n is a, t, c or g
tggaccttttgtgactaatcttcagttttgtaacttgagtattctacaagcttagtgttcttagtcattctgtttaggccaccataaagcttgtgtagagtgtctttgaaggatgatttgaaaaggtagtgtctttaaaaaatttctaagtgaattattattttttttttgaatttcagtgtgtaaaggttgccataaaggacaaacaagtgaaatacttcatacattacagtggttggaataaaaagtgagtattagatcttacaattctatttgtaattaacaagatagcttgtgtcactgactggcttagcaagcatatgcttttcanttctgcagttttaatgtaatatagtacatattgaagcaaaggtgaatcatttgtagtatgacaaaactattagaaattagggtactgagccattttaatttaaatatacttggatcttgggaatatttgttatgttctagtgtaatatctattagtcatatagtcaatcaattattctggttgaatgtggcaatcacatttttctgtttttttttttttcctggttttggtacatttttaggatggcctgaattatttggccttaccacaaacatgttgattatatatgttatttcaagcagctgtgctaaaaaaaactagttgggtttt

SEQ ID NO: 4815 - DNA, 661 bp, Homo sapiens
  misc_feature [331]..[331]: Chromosome 15, SNP identification no. = rs6496053
  misc_feature [331]..[331]: allele = c, in linkage disequilibrium with rs6496061, respectively
  misc_feature [331]..[331]: n is a, t, c or g
ggaagagtcccttctccttaattttttggaattgttaccagttctcttttctatgtgtggtagaattcggctgtgaatccatctgatccagggaaattttttgaccggtaggatttttattactgactcaatttcagaaattgatgtttgtctatccagggtttaaatttttttaaattcaaacttgagagactgtgtgtttccaggattttacccatttcctctagatttgctaatgtctgtgtatagaattgttcatagtattctttgagaatcttttttatttctctgggaacaaccataatatcatctttgctatttctgattgtanttatgtgcatcttttctttttctttgttaatctagctagcagtctatcaatcttgtttatttttttcaaaggactaactcttggtttcattgatcttttgtatggatttttgcatctcaattctgttcacttctttgctaattttagttatttcttttattctgctagctttgaggtgttttcctttttttagttattttatctacaattttagattgttaattttagatctttctaacttcttgatgaagttagggctataagatgtttagggctataaaattttctcttaacaatgcattagctgcatttgagattgcagtaaaatgt

SEQ ID NO: 4816 - DNA, 661 bp, Homo sapiens
  misc_feature [331]..[331]: Chromosome 15, SNP identification no. = rs12439498
  misc_feature [331]..[331]: allele = t, in linkage disequilibrium with rs6496061, respectively
  misc_feature [331]..[331]: n is a, t, c or g
tatccttgccatactatgtacattttcttccttgaggagaaatctcctcatctcaactgtattgtgctgagaaatatagagccagaatgctaatgcagaggtgaatgatccatttacaatctgcaccaagtgtgcatgcttttgtgtttgttcatatgcctctgtgtgtgtgtgtgtgtgtgcgcgcgcacatgggtgagcgtgtgtgtgttgatgggatggggggttatgcttccatccctttatttaggacagttcttttctcaggtgaaaatatactgagtggatagaaatctcctctcattatttctgtgtatcattgctcttctgnctcagaggctcatctagggatagaactgttgttgaccaatattcttctttgaactctgcatctacttttgtatgtttttgaatacagcagtaggaaagtgaagttggaaaaacaaaagttcatagttttctgctttcatactcctaatttgagctcactaggtttttgttttgtttttcactaaatctgaattaaacagaatcgctaggtttttcttattgtttcacaagacctgtacagcattagagttaaacacaatcaccaacattaacttattacccagtgaaaacgtttctgtgtttaacattccagatagacatcaccaagtcc

SEQ ID NO: 4817 - DNA, 661 bp, Homo sapiens
  misc_feature [331]..[331]: Chromosome 15, SNP identification no. = rs4984579
  misc_feature [331]..[331]: allele = a, in linkage disequilibrium with rs6496061, respectively
  misc_feature [331]..[331]: n is a, t, c or g
ttgtctttgtcataacactagtcatcttctgcagtgttatttgttcatttatttatttacttattgcatgtcttttcccactacaatataagtttctgagggcaaaccctttgttttcttgctcactgctctttacttggtaccaaaaagagtgtctggtacatagtaggtgtcttaataaatatctgtgccaaaatgactattaatacaagtaataatactataaaacatctttctcagaaatattacacgaattatgcaaacataaatttgctcattgaagcaaaattaaaacttttgtcaaattcgccccttatatcccaatgaaatntgacagatttaaatgtagaacatatttttatgtaggttataagctctcacaggctgcccttttatatttgttataggaaatagcctattatgagtgttgaattaatatggatcatgattgatttaaaatgcatggtgttttgtgctggtattcagccaacatctatattcaattaaataatcattacagttgccagcagttgtgcattacactaatggcaagagatacacttgcaggggctgaattttattctgggatgatataggtgccatcccaagtctgagagagatgctgaaatgtgaaattctgatctcataaattagtatgtgc

SEQ ID NO: 4818 - DNA, 661 bp, Homo sapiens
  misc_feature [331]..[331]: Chromosome 15, SNP identification no. = rs4489958
  misc_feature [331]..[331]: allele = c, in linkage disequilibrium with rs6496061, respectively
  misc_feature [331]..[331]: n is a, t, c or g
acaggaggcattgttttgggagaacagcagtcagatctctctcagatgcctacctaagcatccccagtaagagggagccattgtccggggttctatttgcatgaccagttggagtttgatggtctgaaggtgagaagaggcaaactgggttattagaagacatggatcaaaaagaaataagggggtaaaggacagctcaaaaatcctaagcctgctgacacacctatctggggctgtagttatgcctggtaagacttgggtgcatggggcttggctttggttagctcccttggtcttattttcccagaaaagaagcctctgggttatgggnaccccatttatccccatcaactggcatgatttgcaggataattgcccagatttagggttttgatccagatttttacgttacccatcctttctgtttcttctgagctgcagccatagatcactggttggatcacaggaattagcagtgttagtctaaaatgcaaaaaaaaaaaaaaaaaaaaaaaaaaccagaaaaacaactaataagattagaattcaatgacaagtgtatgataagttttaaagcataatttttgcttttctagttcttatttttaagcaaatcatggtagaactgagttgtttgcaaaataaactttagacttatact

SEQ ID NO: 4819 - DNA, 661 bp, Homo sapiens
  misc_feature [331]..[331]: Chromosome 15, SNP identification no. = rs6416529
  misc_feature [331]..[331]: allele = c, in linkage disequilibrium with rs6496061, respectively
  misc_feature [331]..[331]: n is a, t, c or g
ctctaatggaattctattccataaggaatctcagataagactttttgaagctgagcctagccgtggtcttgtacccttagatacctatgagttgggtgcacttttctcttcttaaggtcccaagataacttggggatcctggacctattagaaagtgacattctttactcaccacaggttaggaaccctgtacaaggactgcagacaaggtatgaggtcagttttcccaaggggcttttattggctctacaagtcaagcttgatttcttaaagggaagtatacccttccagtcaaagccttgataaaacaaccagtttctccagttgagtnctgttgcaaaagaaaatggattcttatttcatgtatgcaaataactatattgccataagttaagaatactcacaaatagtttccaaattcttgagaaaccaggcagagagaaacaaacatgctccaaattttgttcacaggagtatactttaccgaactcttaaaagctgtaaattgctaaaaataagtttttctgactctgaaaaacaaaacaaaggatcagcaatgtattaagccaaatcaaaaagattacttcagtcttcgattcagtccattcagttaactcttctgcttgatattcatgaacatttcagctcttcataagtcctg

SEQ ID NO: 4820 - DNA, 661 bp, Homo sapiens
  misc_feature [331]..[331]: Chromosome 15, SNP identification no. = rs4247091
  misc_feature [331]..[331]: allele = g, in linkage disequilibrium with rs6496061, respectively
  misc_feature [331]..[331]: n is a, t, c or g
gtaatgacacaggatgttttcgggtgccacttcaccaaccagtaatttccatggcctgtggtgttccagcctgggcttcgctatgctccaggctcactgctggacttggcctgcccacgtggcctggcagggtgcgctcagctcacactaccagtctggataccatgctcacttcaggatccacacccagcccatggctggcctaggcatgctgtgacctgcttctgccttgggcactggagacgacagcaaccacaaaaccccaaagtgggtacagcatgtcacagctcttgcttggggaaccccgaggtctgggcctccagaagggtcncagctcatttgtgttacagttcatttgttcccatggtctgcacacttcagcgaatgggggtgtgtcccagcttgttcagtctgccacccagctctggcccacagctcctggacaggccctgccctgctgccactttctgtcacgtggggcagctgcttggcgctggtggagggtaggagggctacagtggtacagctactttccatctgccagtgggttccgagttcttgtcctgcatccaagaagaatgaggttatatggacaaccagagtgtgagcaagttggagaaatgtttcattgagtgatggaacagctttcagtgaaggggga

SEQ ID NO: 4821 - DNA, 661 bp, Homo sapiens
  misc_feature [331]..[331]: Chromosome 15, SNP identification no. = rs6496059
  misc_feature [331]..[331]: allele = g, in linkage disequilibrium with rs6496061, respectively
  misc_feature [331]..[331]: n is a, t, c or g
ctcctctaaattttaaattcagaatgtcagagttcaagaaaatccctttttgaattttaaaggcaattgcatgacatccataaatcaagttgcataaaatggacacctttgtgaaatatccagttttataatttgcatccagtttttatgtatttataaatataataatttagattatataataatccatattagaatgattataattttatgatttgcattcagacataatttttttccataagacttgcacatcttttgttagatttattgtaggtgcttatcctatattgctatagtaataatatatacttaaaattctattttctgnccatgcatggtggctcatacttgtgatcccagcactttagaaggccagtgcaggatgatcgcttgagcccagaagttcgagaccagcttgagcaacatagtgaagcccctatttttacaataagtaaaaaacaaaattcgatgggtgaggtggcatgtccctgtagtttcagttacacaggaggctgcggtgggagaattccttgagcccaggaggtagaggctgcagtgagccatgattgtgccactgcactcaagcctaggcagtagactgagaccccatcttaaaaaagaccaaattctgcttcccaactgttgccagtatagagct

SEQ ID NO: 4822 - DNA, 661 bp, Homo sapiens
  misc_feature [331]..[331]: Chromosome 15, SNP identification no. = rs6496060
  misc_feature [331]..[331]: allele = t, in linkage disequilibrium with rs6496061, respectively
  misc_feature [331]..[331]: n is a, t, c or g
gccctgttccagcaaagctggacttaactccatctgactgtcagcctctctggtactctgcatattcctatctctagagtctctgttgactccattaattctggaatatctctggggtcacaccaatctcctgcctagcctacacacacattcctttctatccctgacaagtgagaaaaaagaacagatcctagaaaatgtcttcattttcttggtaggcttatcttttatgtaagtatgataatattatatatattctgatatactatattataagtagagcttataattccactgataagcagagtaaggaaaccctaccacagagtgntgcaaaagaataagcatctgacagcttcagtgagtcagctttctgtgtgatactaacctgagtgacttaagcagccagatttcaaaaagaaatagatttgcctctaattattctaaatgcatctgtttaaattggctataatacagcaaatgtcatgtagctttaatggtacacattaggacatgtaactttatgactggaaataggtatgttattaatttaaaaatccagtttcccatatcccctttgatacagtaatgggctcttggagtgagagactcatattccaaaagatccacgtgcaatccaactacaggttagaaatcaaat

SEQ ID NO: 4823 - DNA, 661 bp, Homo sapiens
  misc_feature [331]..[331]: Chromosome 15, SNP identification no. = rs6496061
  misc_feature [331]..[331]: allele = c, g
  misc_feature [331]..[331]: n is a, t, c or g
aatggtacacattaggacatgtaactttatgactggaaataggtatgttattaatttaaaaatccagtttcccatatcccctttgatacagtaatgggctcttggagtgagagactcatattccaaaagatccacgtgcaatccaactacaggttagaaatcaaataatacgcagccactttcatttttcaaaaatctcaaacagggcatatataggttgttactttatgatgacttgctaagatgcattgtttataattctttagtttctgttttcagatttcagtgtcttcctttgccaagtttcaaaaggaaaaaaataaattaatcntctggagctgaaacagaaacatttggtctcctgtaatcctcagttcttaacctaatgtggcagctcatagggaaactgtcagatctgcaatcctaattgctataagttgcctcccatgtgtacacatgtaatggtcaggagtgaatatgcgttgacaacttatcttctctgttccatagttctaaacatccttagtgtgtgtgcggttttacctctgtgactcttgggtaggctacatatgggtgtgtaaagtagctgttgccagcctggaagctagcctcttctgagaacattcctactcatatagagacaaacatgagaaactatggc

SEQ ID NO: 4824 - DNA, 661 bp, Homo sapiens
  misc_feature [331]..[331]: Chromosome 15, SNP identification no. = rs4372639
  misc_feature [331]..[331]: allele = c, in linkage disequilibrium with rs6496061, respectively
  misc_feature [331]..[331]: n is a, t, c or g
aaggattgggactttgtgctaatttcacctttgaaaaactttgatttagaggtcagtgatgtgatttttcattttctaatgaaaggttgatcctttattgacaatagtaaagttagtaggtctcctgtataacatgataaagtactaataagccagccggtctggaagtttttagaatcagatggggagagcagtccttaccccattgtccctgccatttgttctcaagcccctcccttagtttttacagtcaacccttgcagaaagtaaatgttcatcatcaggccctcttaatctgtttcaataaaattgttcaagtaacagaagaaancgaatctgttctctagaaggcaggaaggcagggagggtgtggtatgtgctgcgcctaccaggagagcaacatttctttgaagtgttatgtagtattttaacacattcctgcatttttaaaattcaactttattacaaatatgtacacttttacattacataattctcctccttctaactaaaggaatttgagaatttgccttttttttttttttttttgagacagagtctgactctgtcacccaggctggagtgtggagtgcagtggcgcgatctcggctcactgcaagctccacctcccgggttcatgccattctcctgcctcagcctc

SEQ ID NO: 4825 - DNA, 661 bp, Homo sapiens
  misc_feature [331]..[331]: Chromosome 15, SNP identification no. = rs766233
  misc_feature [331]..[331]: allele = g, in linkage disequilibrium with rs6496061, respectively
  misc_feature [331]..[331]: n is a, t, c or g
ttttcaagactcttgtaaggcattaccaaatgaaggcaacatatatccaagttcaccttgtgaatcaaacaatccatttatagattcctgtgacaatcacaggttctgctggttattttttaaacaaaagccaaaccaagagcgaatatcaggcttaaagtttaagctgtcactgaaatgaactaagtttgattaaatacactttagctaaatgcacaaagaaagaaatgcgtttctgacacctctctctccacagccaacaccattactaatacgcacatcctctaagccagtggttttcacactgggcttggtggagacccagattttncacacttagttttcagatgctgccctgagaagtaggagacaaaccaagccaagggggcatcctaattccttccccttgcttaaccaacagctccattgttgccttattttattggtggggaaaaggtagaattctggagaatttttctttgataaaaaatgaattttacagtcaatcaaaaaagaaatcaaggcctactcttctctgctgtgacattcattccaaacaacatgatataataacaacaaaacagcttaatacacttacacatagctggaagtttacatctaggagagaccttcgaaataatatagtcctgtcctgttattc

SEQ ID NO: 4826 - DNA, 661 bp, Homo sapiens
  misc_feature [331]..[331]: Chromosome 15, SNP identification no. = rs12440481
  misc_feature [331]..[331]: allele = t, in linkage disequilibrium with rs6496061, respectively
  misc_feature [331]..[331]: n is a, t, c or g
gttgctgaagacagcaattgttactataacattggacataatactttcatatatttttttctcttttaaggatcctaattcatgtttacatatgcggcttgccccgttactcattttagattcccttctatactaagataattttttatcttaatgcccattttgacagtgaagggttaaaaagtcctgattaagttgtaaatggttgacatttagctatcaagtataaatctgtggttaaaacattcgtgcaaatgagtttcagtgtctgtttttcaacaggagcacccctggtagctctccatccctcccctttttctatcttagcacntcattataaaaggggacaaattgcagtactttttcttctccctctgttccaagcccactgagaattaagctttcagaagaggttctcattttgatgctaaacggccctgatattttgcctgacaaattaaaggtggaattatacagaagtgagtggcttatccatgaagtgtttctacctcctgtatgtgtggccggtggctggaaggctggagaggcagaggcagcgcccctcctgagcccctcttaatttcagcgtctgagtggcagctggaaacaaggcgctgactgtttgcctgctgtccagtcttgcattattaggtaaaataaa

SEQ ID NO: 4827 - DNA, 661 bp, Homo sapiens
  misc_feature [331]..[331]: Chromosome 15, SNP identification no. = rs4306453
  misc_feature [331]..[331]: allele = c, in linkage disequilibrium with rs6496061, respectively
  misc_feature [331]..[331]: n is a, t, c or g
tgaggaccagtttttaattatttaggagatctgtgagttggttgttaaaccagccatggtgaaaatatttacagcacagaaattggcaaatgctacaagtcaggccttttatttattatagtattaatttattctcctttttccaacaggctgatttgctatcacaccactgcctaaagtataccatctggaagaaatctgagattttagggatgagaaactagttgtttatccctgatacagcaacttatctagaaattctttcaaatgctgtctgctcagcttaagagacgagtgaatctctttgatcgcatgactgaccctaggttgnatatagttgtcacatgtcagtagcctatgtgatcccaagcacggctccccagctggctgccagcttgcaatatccctccagttttcctatctaccaggttaattgctccccaatcaaaattaaagatgcactaagttcttgcattgagaaaaggacatcacccaattacatttccctattgtcaattctgtgctatgcataacagacttgaaattgaactgtgctcatggaattgagtacaaaagaggattcaatttaacaaacagttgtcgagtacctattatgtatggcataatgaatacaaataaaatagttttaaaatctccaaca

SEQ ID NO: 4828 - DNA, 661 bp, Homo sapiens
  misc_feature [331]..[331]: Chromosome 15, SNP identification no. = rs4247087
  misc_feature [331]..[331]: allele = g, in linkage disequilibrium with rs6496061, respectively
  misc_feature [331]..[331]: n is a, t, c or g
aaaggatcataacaaaatgcactgctattgtgggtctgactgggttatatgccaggtattgtcctggttaagtggccattgctcaagcctgactactgcctatagggtgagttgctgtgagattttaattcacgagagggaggttgtgggtaggagtgatgcagttcccgcgcaaggaagtttgattgcattcattcaatccccacagcctgaaaaatacttcctatttattttattcagaagcttgttgtaacatatcccagagttgcctagtcatttttttccactagtgaaaagtctaatttctttttccattttttattcttctatncaattgactcaattgcaataagggtgtaacattctgctatatttgcctctctcttatctggtttcatcaccaatgcttgttttatcccagagaatggccaataaaagagttaattccattggggtgcctacctgattcatgtttgttcttgattgttcaaccactacttaaacagtaaaataataataataataataataataaattaatttacaaatggtttgtaatgaatctgaggtacctcagttgtcaatttaccagtatatgtcaagtacagggggcacattttccaaagctgtgctttactgcttgacttttctttaagtcagt

SEQ ID NO: 4829 - DNA, 661 bp, Homo sapiens
  misc_feature [331]..[331]: Chromosome 15, SNP identification no. = rs1562628
  misc_feature [331]..[331]: allele = a, in linkage disequilibrium with rs6496061, respectively
  misc_feature [331]..[331]: n is a, t, c or g
atgcttcctgttaagcctctgaaactgtgagtcaattaaacctcttttcttcataaattacccagtctcaggtggttctttatagcagtgtgagaatggacttatacagtaggaatgcatgtgaatgtgccatacacatatgctgacatacatggttatacacacatttaaaaattcaacatgtttttttaccaatgtatgaaacaaacacatataacaaaataaagcctttaatgaatgatatctgaactacagtttatcaatttggtttcagctaactgccaaaatagagaataatttttattaattaaccttaattctcattcagaanctgacttaaagaaaagtcaagcagtaaagcacagctttggaaaatgtgccccctgtacttgacatatactggtaaattgacaactgaggtacctcagattcattacaaaccatttgtaaattaatttattattattattattattattattttactgtttaagtagtggttgaacaatcaagaacaaacatgaatcaggtaggcaccccaatggaattaactcttttattggccattctctgggataaaacaagcattggtgatgaaaccagataagagagaggcaaatatagcagaatgttacacccttattgcaattgagtcaattgt

SEQ ID NO: 4830 - DNA, 661 bp, Homo sapiens
  misc_feature [331]..[331]: Chromosome 15, SNP identification no. = rs6496067
  misc_feature [331]..[331]: allele = g, in linkage disequilibrium with rs6496061, respectively
  misc_feature [331]..[331]: n is a, t, c or g
ctcctcatagatccaagaggacctgcttaatgccctcagcactggcaagtgaccacatgtatgtggtgctaaccaaggaagcttacttgagctttgctatccaaggtttttattgagggtcaatcatgtaggcatggaatgccctcaggactgacctcagctactcagactccagtcccaccatagagttcaccataagaaatgttagaataaataaaaataggtgttttctgaaggtcacattgttaggataaatttatctagtcaaactgatacagcacagtccaaagcctgaggcatacgaaaacagacattcgatataaaaacagcnacaacgacctcagggatgtaaactactcttatcaggcagaatattccaagggctcagagcttatctttcataagccactggctacgagccattcctgaaaataggcgtttttctgggatgtccagtgttcgagcaacccaggcctcctgagttaaccctttcctgtctaacaggtgttactcaaaattaagttcccttggacaaatactcaggacgcactgaaataaaaacattaaacagctttctcctttgctcttaacacaccaatagctgtatgacacttcaagtgtgtgagtgtaaatgtttatcttcacttaatggatttcaaaa

SEQ ID NO: 4831 - DNA, 661 bp, Homo sapiens
  misc_feature [331]..[331]: Chromosome 15, SNP identification no. = rs6496068
  misc_feature [331]..[331]: allele = a, in linkage disequilibrium with rs6496061, respectively
  misc_feature [331]..[331]: n is a, t, c or g
ggacctgcttaatgccctcagcactggcaagtgaccacatgtatgtggtgctaaccaaggaagcttacttgagctttgctatccaaggtttttattgagggtcaatcatgtaggcatggaatgccctcaggactgacctcagctactcagactccagtcccaccatagagttcaccataagaaatgttagaataaataaaaataggtgttttctgaaggtcacattgttaggataaatttatctagtcaaactgatacagcacagtccaaagcctgaggcatacgaaaacagacattcgatataaaaacagcaacaacgacctcagggatntaaactactcttatcaggcagaatattccaagggctcagagcttatctttcataagccactggctacgagccattcctgaaaataggcgtttttctgggatgtccagtgttcgagcaacccaggcctcctgagttaaccctttcctgtctaacaggtgttactcaaaattaagttcccttggacaaatactcaggacgcactgaaataaaaacattaaacagctttctcctttgctcttaacacaccaatagctgtatgacacttcaagtgtgtgagtgtaaatgtttatcttcacttaatggatttcaaaatctttccccccggagatc

SEQ ID NO: 4832 - DNA, 661 bp, Homo sapiens
  misc_feature [331]..[331]: Chromosome 15, SNP identification no. = rs11630913
  misc_feature [331]..[331]: allele = c, in linkage disequilibrium with rs6496061, respectively
  misc_feature [331]..[331]: n is a, t, c or g
aaggaaaaagtattcaactatcaaaagtatagcaaaatgtccttaagacatcagttgatgttaactgacttataaataaaaatgacctccttgtttctgaaaaatgtttcccatatgataactcacagattatatttgaaattgcccatatacctgctagaattgactgaacttactactgggcaattaaaattctttttattgtagttgttactattactcttattctgtgaatttgcagcagagttacaaatgagaaaaaagggtaatgtaaaaagcaattggaaattagcaggcagtcatttgaaaatttggtttaaaaaaatcttanggtctcattaatgcaacgtggtaaaaacactctctcaagcattttgtttcaaatacaatcgtgaaatgaacacatggattttgcagagacaaaaggaaagtgaaatcaagccaactttttcacaggaagatgtcttagggtccaagcattatgaatcatttatttagttctgaaatctaataaaacatctttattaaaatgaaagcatgtttcactaccagagatatttttgatctgatagcaaacaagttttcttttatttatttagcatatgcatcacatatgcttttgaagtaaacatcaacgcataacaaataaatactatacaac

SEQ ID NO: 4833 - DNA, 661 bp, Homo sapiens
  misc_feature [331]..[331]: Chromosome 15, SNP identification no. = rs4283178
  misc_feature [331]..[331]: allele = c, in linkage disequilibrium with rs6496061, respectively
  misc_feature [331]..[331]: n is a, t, c or g
gggaggaagaggagaaggggagatggaaagagagggagagattctttcttatagcaaaaatagtcttcatctgtggacaaaattgggtttttgaagctttttctgtgatgtcaaacagcaacatgtgtgacttacattgcttttgcatacaggatcaacgtccaagaggctttggggccagccccatgatgccaaaggtaatgtaatatgctgtaggcagtcagatctcaacctggggatgcttctttgcaaagaataaggtgaaatttcttgagggagtcaggagaatatgagaaggttaaggtgttgctcaaataaaaatgatgctttnagtgactatccaattacagtctacggcagctcttaaccataactatagccatagttggatgaaaacaaaacaggtagattcataggataaacagacatatagaaatgtcctaataatacagaccctaatctacagctgtcttattgccatgatgttcccattattttttagagaaattgcaaatattttttaaaggaccaagaaaaaaaaaagagtttgctttggtgctgttttgaaattatttgcctgttacaatttaatcaagttctgctctggtcctttgtggccaggcaatcaatgggttaagttagatcactaacgagtgttccc

SEQ ID NO: 4834 - DNA, 661 bp, Homo sapiens
  misc_feature [331]..[331]: Chromosome 15, SNP identification no. = rs9920787
  misc_feature [331]..[331]: allele = g, in linkage disequilibrium with rs6496061, respectively
  misc_feature [331]..[331]: n is a, t, c or g
actcctcagtaactctgactggccattgcctgctaataaggattcattatatgtatagatcagtttagcacacattaggaaaatatatcactaacttaacatcttcattatcagagagaatgaaggtttaaaaatatttatttgaatttcatggcaatctatctagctgtgccttctcataagatttcaagatagcatttctatttctctagttacattcaaaatggaagagaaacaagagagaactgaagcagtggctgtagcttttctagagccttctggcccccactcagataatataaaaaatattaagtgccatctcatcagtcanttaatggaagttcttgagggctaaatgagatgtcttgtaagaataggtaatgagcagtagtaagttctaacttagttgtattttattttacttaatttatgtttttgaggcagattctcactctgtcacccatgctggaatgcagaggtggaatcatagctcacttcagcctcaaactcctgggctcaagcaatcctcccacctcagcttttggagtatctgggactacaggcacaggacaccatgctcagctaatttaaataattttttgtagagacgggatcttgctatgttgcctgtatattagtctgttctcacactgctgtagag

SEQ ID NO: 4835 - DNA, 661 bp, Homo sapiens
  misc_feature [331]..[331]: Chromosome 15, SNP identification no. = rs6416531
  misc_feature [331]..[331]: allele = g, in linkage disequilibrium with rs6496061, respectively
  misc_feature [331]..[331]: n is a, t, c or g
ctccacctcagcctggacttcattgtccatatcactatcagcattttggtcaaaatcatttaacaagtctctaggaagttccaaacattcccacatcttcctgtcttcttctgagccctgaaaactgttccaatctctgcctgttacccagttccaaagttgcttccacattttcaggttatcttatggcagtaccccactctctgctctaccaatttcctatattagtctgttatcacactgctataaagatactgcctgagactgggtaatttataaaggaaagaagtttaattggctcacagttccacatggctggggaggcctcagnaaacttgcagttatggcagaaggggaagcaggcacctttttcccgtggtggcaggagagagagagagggaagctctgggaaactgacattataaaaccatcagatcttgagagaactcactcactatcacaagaatggcatgggggaaactgcctccatgatccaatcacctgccaccaggtagattcctccctcaacacctggggattacaattcaaaatgagatttgagtggggacacaaagccaaaccatatcacccaggctggtctcaaactcttagactcaagttatcctcccacccccatttcccaaagtgctgggattgtatg

SEQ ID NO: 4836 - DNA, 661 bp, Homo sapiens
  DMN
  misc_feature [331]..[331]: Chromosome 15, SNP identification no. = rs2305446
  misc_feature [331]..[331]: allele = t, in linkage disequilibrium with rs1965866, respectively
  misc_feature [331]..[331]: n is a, t, c or g
ccctagaccagtttccttcatgtgcaagttacacccccatggcttcgtcaaggccaactcagcacagtctccttaccggtaggtcgccacctccagactgaggccggtcttcacctgcaggaggtcctgatagtcccgcagccagtcagccatggccaaggtgagggttgccttctcatcctccaggcagtcaatcactctctaaagagaatagacagacttttatatcagagaactggagctttactgggtcgaactgaaggtaccaacaattcaggatcgaattgaaaaacagaccagggttattagcagaccagaaaaacacccggcnttattaaacatgcagtcacttgcaggatggtttccaatgttgtatctcttccatatggaagttttttattgcatgtggaacattttgataggacactggcttctctgttcagactctctattaataatgaatgcttaggagtttattcaaatcatctctaccgtttagacatcaggctgcttaggagagccagtgcttcaaaccagtcactaagacgctatggaaaataagccaagactagaaatcaggggttttacaatattcaaaacataagtcactcagaattgaactgaaatgtactccccaaagtcatgatttctccaacaataa

SEQ ID NO: 4837 - DNA, 661 bp, Homo sapiens
  DMN
  misc_feature [331]..[331]: Chromosome 15, SNP identification no. = rs12911794
  misc_feature [331]..[331]: allele = a, in linkage disequilibrium with rs1965866, respectively
  misc_feature [331]..[331]: n is a, t, c or g
aacagcgtggggaaaattgctcccatgatccagtcacctcccaccaggtccctccctcaacacgtgggggttacaaatcgagatgaggtttgggtggggacccagagccaaaccgtgtcacaggatttggacccaggaagtctgtgtctatctgcttgattgttgctttgaatctcagggctctgatgccaccctgtgtgggtttggccctgaactgaatctcttccaagagattagcatggtgcatgctaatgtaggccaactggctttatgtatcaagatgttgacttgagttcaaggtaaccaactctgatgaaaaggtcacaaagcnctcaaaggggctgggtgctgggtggggcagagaatgcagtccagtccccctgggtgtggcctgcaggccggcggaacagtgctcctcccctccttggcatcaccctcctttcccctgggtgccagtgcgtctttgattgaggtggtgccccttgtttcctggcagctctcatgctcagggcagctatgaaggagccagggtctgtgacgcttacagtggaaggaattttagagacccagttgcccaacttcaggaacactaacaatagccagctttatggcgtccttactgcctgccagacgtggtgctgagttctttgccactattctc

SEQ ID NO: 4838 - DNA, 661 bp, Homo sapiens
  DMN
  misc_feature [331]..[331]: Chromosome 15, SNP identification no. = rs1965866
  misc_feature [331]..[331]: allele = t, c
  misc_feature [331]..[331]: n is a, t, c or g
ttttcccctttctctgagccccggccaccagcccctcagtggcagcaaggctctcaaatgggggatccagaaaggccctcatggccttagccccaggaccacccctcaattcatcccttggtgaagccgtggctcctccatggactccatgtccctgggaaggcctcaccccttagcagcctcctggggcccaggccaggggctgcctgatagagctgctccctcttcactgatgggagtgagggctcagatgaaccctggctgatgtaagtcttccagaaaataaagacagtgaggccggcccaggctgcaatgtaaactacaagcaacntatcagccagatacccttttaatagacatcaaagcaattcaggtcaccttgatattcttagagcaaaaaatcctgatcagggccgggcgcagtggctcacacctgtaatctcagcactttgtggcggcgaggtgggtggatcacctgaggtcaggagttcgagaccagcctgaccaacaaggtgaaaccctgtctctactaaaaatacaaaaatcagccaggaatggtggcaggggcctgtagtcccagctactcaggaggctgaaacagaattgcttgaacccaggaggcggaggttgcagtgagctgagctcgtgccactgcatgcca

SEQ ID NO: 4839 - DNA, 661 bp, Homo sapiens
  DMN
  misc_feature [331]..[331]: Chromosome 15, SNP identification no. = rs8032817
  misc_feature [331]..[331]: allele = t, in linkage disequilibrium with rs1965866, respectively
  misc_feature [331]..[331]: n is a, t, c or g
cataacccaaacaccttcctctaggccccaccttcaacacggaggtcacatttcaacatgagattaggagaagacacacatccaaaccgtatcaaatccttagtttcaggtacagctggtccacatggcgggatggtctctctcttctggactcttcccaccacgtggctgggtggggcccgaacagctccaggcttagggccacccagtctcgtgcccgtggtcatcctctcggcctctccatctctgctgggtcatgttcctgcctctgagcccatcactggccagaggaatgtagggctctagagctttgggttggggtcccagcctnttatgagtcacatggactgagactggggtggtgggagttaccccaaatcaggcactgttctagggcagatgccaggcaggcctggaaaactgacttctgtgtgttaggtaatgccccatgccagatgaatcttttccctgcagggcagttggatttttctattttctttctgtaatagttctctgagttagaatcaggaaacttattttgtgccttgcctttggaattttgagctcttttcttccctacttcgtcctgccccctgttctccatcctgaaaagccagtgtaaacatgggcatcctgcctcagagtccggggcctgcctttt

SEQ ID NO: 4840 - DNA, 661 bp, Homo sapiens
  DMN
  misc_feature [331]..[331]: Chromosome 15, SNP identification no. = rs8038845
  misc_feature [331]..[331]: allele = a, in linkage disequilibrium with rs1965866, respectively
  misc_feature [331]..[331]: n is a, t, c or g
ccacgggcccagcttttcagggcatcgatcgcgagccgtttctgctcactgtcagcagtctgtcagccaggacagagtttattttgtctgtctatggctggcgtttccctaacccgattatggattgatgtggccatctcctaggaatttaggagctactcgtgctttcaggggagcaagcgatggatttcactgtacctctttctgctgtccaagtttgcatggggaaaatgaggaccctgccaggagcttgcctgacaggccctgccccgctgcagactcccagccctgctgggtaggatcgctgcaggcctcccgcctctgtgctccngtatagtctcggagatgcccgttgacgaagaagacatacagatggttgaatagaacccattcttttgtataagccaaaaacttaccatttttgaaaatcaccagtgcatgtctggaagacaaaccctcgtcatcctcgatgtgagtcttgctcagtagtctgcactgctccgattcggaggacaggtgtgaagttcctgtttgtgttcgtggacttgcgctcttctgacccttattctttaactaaagtgctcatttgatctctgcaaaccttgacccacctgtggtggccgttgccccagaattgctgagttgactgtcatcatcctgt

SEQ ID NO: 4841 - DNA, 661 bp, Homo sapiens
  DMN
  misc_feature [331]..[331]: Chromosome 15, SNP identification no. = rs896700
  misc_feature [331]..[331]: allele = g, in linkage disequilibrium with rs1965866, respectively
  misc_feature [331]..[331]: n is a, t, c or g
ctccatatggctccacaggattctgtgacctcggacaggcccagggcagctctaaggggactgccgcatgcaactgcaagcagcccagactggcgcgtgggtcctggtgcaagccccgcctcccactgtgactgcttcccctctcctccatcaacccatccttcatcttgtcttccaggctgctgtgagaagacctagcacttacctgcgcctgggccactctgccaacagcagtgtgcgcacgaatcacctgggattttgttacgaggccaacttcggtccagtatgtctgggtgggcccaagattctgcattcccaacaaacttgcaangcctcacaatgcgcatgctgccgccctgtgagctgtgaggccctggaccggggattctccaccctggtggtacctgacaatcatccagggaggtttgaaaccactgtgccggttccacctgtcactaacctcatcagaatcttgagggccgggagattcgcaggtgcagtccctccctgtccccgagcatgtttcccttaccattctgctgctagtgcaataaaacgcacactccaggcaagaccctgtgatcatacagcaaatggatcagtacctcgagccccacacaactgccgctactcttgacaggagacaagagccagtacagcc

SEQ ID NO: 4842 - DNA, 661 bp, Homo sapiens
  DMN
  misc_feature [331]..[331]: Chromosome 15, SNP identification no. = rs7162579
  misc_feature [331]..[331]: allele = t, in linkage disequilibrium with rs1965866, respectively
  misc_feature [331]..[331]: n is a, t, c or g
tgggtgtggtggcacgtgcctgtagtcccagctacttgggaggctgaggtgggaggatcacctaagcccaggaggcagagattgccgtgagctgagatggcaccactgcactccagcctgggcgacagagcaagatcctgtctctacataaataaataaatagaatatataattgaaaggatcgaccagtacctttggttgctggtcaaataaatgagttaacattcagttaactataaaatacagatggtccacagtcccttcccttgttgactcattttagttagctggaaatcagttttctttggaggatgtagaaggaggtggggangacgtgatcgctgatgtttagtgagctcttactctgtgacagccatggttctgagaactttctgcttcttgattaattcctactgcaaacctgtgagttctctccatttcagaaatagggaaactgagtcacagtgggtttgagcggcctgccagggtcacagaactaggaagtggcaggtctcagatctgaatccagacatcctgactccagaactttgtcctgcgcttgcttcctctctgttttatgagtgatgtttgtctctgttgattatctggtttttttttttttcagtctctagtattgacctagagatggctctgggatgtg

SEQ ID NO: 4843 - DNA, 661 bp, Homo sapiens
  DMN
  misc_feature [331]..[331]: Chromosome 15, SNP identification no. = rs8029732
  misc_feature [331]..[331]: allele = t, in linkage disequilibrium with rs1965866, respectively
  misc_feature [331]..[331]: n is a, t, c or g
gctccttctccagctccggagcctccctttcttctctgcacttctccacctgctgtttgctaggaagcaccccgtgaatcacccacaggccccggccccggccccagcaggctcccgcacagacacggcttctgggaacatcctgacagtgcctcatttatggggctgcacagagcagtggccttgtgcccacggtgctgagtcacggcggattgttcagcaattccattaggataatctatcccagacagagagccttgccttggagcctgctcaggacgccgggtggcccattagggcctggcgcctggccagaggccacatgacagcnggcttctgcactgtgggtttgtcctgggctccttaatgaggccagggacttgagttttcttgcacttttgcttattttcctgcataaggggccaccaacctgtggagctgtgtgaaatgcccacaatagcccatgactcaggggattggcatttctcacagtccccgaggcttgggggcagatttcctccaccgctctcaaaataaccaggtttgattgcagcctcagagaacatgctacccatttcttaaagtggtacgaacctattccttaaaaatgtcccttgcagagctttagaggaagtcgtggtttctggcttctcctcagagt

SEQ ID NO: 4844 - DNA, 661 bp, Homo sapiens
  DMN
  misc_feature [331]..[331]: Chromosome 15, SNP identification no. = rs1810091
  misc_feature [331]..[331]: allele = a, in linkage disequilibrium with rs1965866, respectively
  misc_feature [331]..[331]: n is a, t, c or g
ctcccggcctggctcagctgtgaacctcgggtaccacggggcctctcccttgagctgcccaagttagaacggaaggtatgttgctgtccagggaaaaatacgtcttccccaccctccaaagggaatgcatctgctcctcttccagaattccaaagcatcaccaaaccttcatagagttcaggacccacacgaaacaggcaccagccctgcgtggggcttctggctgggttcaggggacaagatacagccccacagcttcccctttctaggcctttaccatccctggctgacactgagcaccaggcattgtggtcactcatgtacttacacngtcgaagccacccccaacacagggcctgtggctgcatcctcgctctagaggtgagaagactggggtgcagagacagcgtcttggtcaagggcatacggctcaccagtaaagagaaaaatgcaaacccaggcagcctgagctctcagccccctcccctgcgataccactaggcctcccagtgaggccagagaccatggtattgcacacaaatttcagaaagcacaaatcctacagatagaccctccgggccatattaatgaaaataaattctcttggtgatttcatccaaaatggccctgcagagctctcctataagtaagaagctcctgc

SEQ ID NO: 4845 - DNA, 661 bp, Homo sapiens
  DMN
  misc_feature [331]..[331]: Chromosome 15, SNP identification no. = rs7164548
  misc_feature [331]..[331]: allele = g, in linkage disequilibrium with rs1965866, respectively
  misc_feature [331]..[331]: n is a, t, c or g
tagcaactgagaaactgttgcacccagagctgccagcagcccaaggggtcttcgcgagtgactggctgacaggcatcccggtgctaagcccctcgccagcaggctgggtctgctgggaccactctcctcagctctgggatctgaagcagtagacgtgaacaacctaatgaaacttctataattttagaactttggcgcagacatagtcaaagaaatcaccttgttgggtacttctcaccattttattaaaggagataacaggatgccaatttggatgaagtgaggcccctgggggtggcatggggaggggctactgacggggggcgctttngcactaccttttccgtctgcctgccttctacttctttttgtcgtctccaaggtgaccccctggaatgcagtttgaaaccacagatgcagtctggctgccttataagtgtcagtccctgccgtctcctggtcagccctctgcaagctgcccccaccagctgtgactccaggaagaacccagtggggggtgtagctgctctggggccctctagcctggggcccacatctctccagtgcccccttgctcctgctcctcttcaccctggactgagaaagctttctagaagggcttggctcgccagtactgccgaagccctggcctggtcatttt

SEQ ID NO: 4846 - DNA, 661 bp, Homo sapiens
  DMN
  misc_feature [331]..[331]: Chromosome 15, SNP identification no. = rs2242076
  misc_feature [331]..[331]: allele = t, in linkage disequilibrium with rs1965866, respectively
  misc_feature [331]..[331]: n is a, t, c or g
ccatagggctggcaagcccacccaccagcctcagcagacctgggccaggccacctgctctgctcaccgccacatccctggcagccagcatggcgctcaacccctactagcccagtgaacaaaatgaccaggccagggcttcggcagtactggcgagccaagcccttctagaaagctttctcagtccagggtgaagaggagcaggagcaagggggcactggagagatgtgggccccaggctagagggccccagagcagctacaccccccactgggttcttcctggagtcacagctggtgggggcagcttgcagagggctgaccaggagacgncagggactgacacttataaggcagccagactgcatctgtggtttcaaactgcattccagggggtcaccttggagacgacaaaaagaagtagaaggcaggcagacggaaaaggtagtgctaaagcgccccccgtcagtagcccctccccatgccacccccaggggcctcacttcatccaaattggcatcctgttatctcctttaataaaatggtgagaagtacccaacaaggtgatttctttgactatgtctgcgccaaagttctaaaattatagaagtttcattaggttgttcacgtctactgcttcagatcccagagctgaggagagtg

SEQ ID NO: 4847 - DNA, 661 bp, Homo sapiens
  FLJ12572
  misc_feature [331]..[331]: Chromosome 15, SNP identification no. = rs12324825
  misc_feature [331]..[331]: allele = t, in linkage disequilibrium with rs1965866, respectively
  misc_feature [331]..[331]: n is a, t, c or g
tgatgcagctcattttgagaggtgatgttgtcactgcttgttgttaattcattcactgtggcattagagttttactgacactgtaacagttagttgagacagtctgaggtctcagttcactctgccttaacagattgccttcaaaatctaatactcagaggaatttccatcctacccctttggtgactgaagctgctgctccttggcccctcattctctagggaaagacatacagcattggtgaatatgcacgaatccccgggaagaatgagaaggcaactgacagtgcttatgcaaattctcagtgtctactaaccatccccacctgttncaaacccgtgtgctcaccattttccctgggagcattttcactactgtgttcgtagagaagagtggagttaggagagaagattctggttgggtcaagagatccttttcagtaatcaagccctgaagaggggcgccccatccttaccctacccctagacctttgtcaaaactcaactcttcctggtattaatatatttgtttcccctaaggttacttatccttactaaggagatttgtccaaaattccagctgaagtgaaaagagatgcaaaggggtgtcagctaggagacagaaacaaatcctcagcccctcactaatcccttgtgtgatt

SEQ ID NO: 4848 - DNA, 661 bp, Homo sapiens
  FLJ12572
  misc_feature [331]..[331]: Chromosome 15, SNP identification no. = rs12591477
  misc_feature [331]..[331]: allele = a, in linkage disequilibrium with rs1965866, respectively
  misc_feature [331]..[331]: n is a, t, c or g
aacccaagaacaagactttttatatgcaattaatgtcattatgaccctctctttaaaaaaggtgggctgttgcagtccaacaatgggttagtcaaagatgattataaaaatcaggatcaaggacaaatgaggctctacacatgaaaacaatgtggcgtggcgtggtggctctgtgggaactccaaatttggcttggaattcctggtatatgcaggacaacaaggaaaacaccaaatatgctaaagggaaagtaaaacaaagggggccactgatggaattacagggaacggattctaacataaggtatggccttccctaggaaggctgtgtntattggcctgcttggaggaatggctggaatatagcagggactcaatagcctattctccagtcttgacttatgaccacataagaccttcctaggccgggcatggtggctcatgcctgtaagcctagcactttgggaggccgaggcaggtggatcatgaggtcaggagtttgagaccagcctggccagcatggtgaaaccccatctcaactaaaaatacacaagttagccaggcatggtggcacatgcctgtagtccaaactactcaggaggctgaggcaggggaatcgcttgaacccgggaggtggaggttgcagtgagccgagatcgcga

SEQ ID NO: 4849 - DNA, 661 bp, Homo sapiens
  FLJ12572
  misc_feature [331]..[331]: Chromosome 15, SNP identification no. = rs12594336
  misc_feature [331]..[331]: allele = c, in linkage disequilibrium with rs1965866, respectively
  misc_feature [331]..[331]: n is a, t, c or g
cctgctttccccatgcgacgtgccttctcccactttgccttctgccgtaagtaaaagctccctgaggccttcccagaagctgagcagataccagcatcatgcttgcacagcctgcagaatcgtaatccaattaaacctcttttctttataaattactccatctcaagtatttctttttctttttttctttttcttttgagatggagtctttcttgctctgtgccccaggctggagtgcagtggcatgatctcggctcactgcaacctctgcctcccgagttcaagcgactctcctgcctcagcctccccacatagctgagattacaggtangcgccagcagctaatttttgtatttttagtagagacggggtttcgccatgttggccaggctggtctctaactcctgacctcaggtgatctgcccagctcagcctccaaagtgctgggattacaggcatgaaccaccacgcctggcctcaggtatttctttatagcaatgcaagaatggcctaatacaccacctcttagggttactgtaggggttaaatgagttaatatacacgaatcacttaacatggtgccaccggtgtaacaaccactcaaaaagcactggatcttttttttacagggtctcactttgtcactcagggtggagtgcag

SEQ ID NO: 4850 - DNA, 661 bp, Homo sapiens
  FLJ12572
  misc_feature [331]..[331]: Chromosome 15, SNP identification no. = rs8023490
  misc_feature [331]..[331]: allele = a, in linkage disequilibrium with rs1965866, respectively
  misc_feature [331]..[331]: n is a, t, c or g
atagtcagccctccatatccatagatcaaaaattatatgggaaaaaacaataaaaataacaatacaacaataaaaacaatacaaataaaaaatacagtgtaacaactactaccatagcatttacattgtattaggtattataagcaatctagagatgatataaagtattcaggaggctttgtctaggttatatacaaatgtgacaccattttgtacaagggcttgagcatccttggagtttgatatccttgggggctctggaaccaatcccccacagatactgaggaacaactatatatatatgtgtgtgagtgtgtatatatgtatgtangtatggttttctaggaaattgagatggcgttaacctctgataagaaaagcttaacagaggccgggcgcagtggctcacgcctgtaatcccagcactttgggaggctgaggcgggcggatcacggggtcaggagttcaagatcagcctagccaaatggtgaaaccccaactctactaaaaatacaaaaaaattagctgggcatggtggcgggggcctgtaatcccagctactcggggggctgaggcagaaaattgcttgaacccaggaggcggaggttgcagtgagctgagattgcaccactgcactccagcttgggtgacagagcaagac

SEQ ID NO: 4851 - DNA, 661 bp, Homo sapiens
  FLJ12572
  misc_feature [331]..[331]: Chromosome 15, SNP identification no. = rs3803472
  misc_feature [331]..[331]: allele = g, in linkage disequilibrium with rs1965866, respectively
  misc_feature [331]..[331]: n is a, t, c or g
ttcttgtcccaatacctctttccaaatagctcaacactgctaacagtatatttattctgtttccatttcaaatctgtgagcagttttcaaagttatgataaatgcttttcttcagatgtagctgagcagtattttcaagagagcatggctcatcttaaggattctgaagggatgggaagaaccaaatttctttcaattcaagatgaattttgccattttctacaaatgactggacaaaaagaggtaagtgagtttggatcacaattgtctagttattcacagttgatatccaaagggcaactcctttactctgcaagcatccattaagcanctactgtgtgcaaagcatgtgccagtctctagagggacacataaataaggctagggctcctttggggcagcttccagagatacttgctcttagaagctgggagactttatgagaatatagattgtcatgcccacctacaaaagatcctaaagaaatagtggacaggccctgcttattgaagtcctgcagatctggctggaatagtgtggcagttagtgtgtctaatccctctctcctcagtttgggtaatgaatggagtttgcatgtctaaggaaaactatacggtgcagaagttacagctcagttgtttagtattgattcgtacaagcg

SEQ ID NO: 4852 - DNA, 661 bp, Homo sapiens
  FLJ12572
  misc_feature [331]..[331]: Chromosome 15, SNP identification no. = rs8038002
  misc_feature [331]..[331]: allele = g, in linkage disequilibrium with rs1965866, respectively
  misc_feature [331]..[331]: n is a, t, c or g
agggggataaggccagatagagggttcccagacggatgttgtcacatgtaagccagccacacatcaggcatctgtgaactcaggttaggacccctgtatattagaatggcctagagcttaggaacagaggaaggtctagtgtgtccacgtgtgcaccttccctgtctatagatttcaaaccacttttatctttatctaggatacaagaaagctcctttattgcaagatcctgacttatttcccccaaccccctcacctccaaattaactttgagaactaaatccacatgagcagcctttgacgggagggcaaattgagtcctattactacngcaaaggggtcacttcctgagaagcagtttattctcctggcaatggacatcccagtctatctccacctgggacaagtgacaacaggatttccagaaggacaggaagtcatagccccttcaagtggctgctgcctcccggcctgaaccttgtgccctgaaacagggtgtaggttcacaaagagccagcagtttcagcactctcacacaaggccacccctacctttgaaaaccacttctagaatcctctgcaatctgatgccgaaggcctgggcagaagctgaggtcattttctaaaacacaggagcatgacttagcttgtaaatctgagcc

SEQ ID NO: 4853 - DNA, 661 bp, Homo sapiens
  FLJ12572
  misc_feature [331]..[331]: Chromosome 15, SNP identification no. = rs8038392
  misc_feature [331]..[331]: allele = c, in linkage disequilibrium with rs1965866, respectively
  misc_feature [331]..[331]: n is a, t, c or g
gctctctcagagcgcacaggggcccagggcagtgggaagtctgaagggagacaggcaactggggcgtggccagccatggcttactctcacttgactgtaccaccaggccccacttggaagctgaggttggaggcatcatgagagaggtagcagggacagctaagaagggcatgggaaggtaaaggacacctcactgtggctattcccaggtgtccatgtcacctgtcaggggcccacaagacctagggcctgtgtacaccaggggtgcctgatttctggtctctctggaacacacggggcccaaggagcatcagtaacccagtgagcaggnagtggggagggcccagcactgggcaagctgaaaaggcaggccacagggggaagagttgagaaaagggagggtcgtgtaaggtaaaaaagaggagacctgggtgagatgcagtgactagcttccgatactgacatttttccagtctactgtgtaaaatgtggctagaggctaggaccagtgggggcgggggagatatacatattcgtgcataggaaattttatcttaggaatccacttagtcagcccctgctccctaaactctaaccagacagagcccattccatctgctgtcactgaacgctgcagaactccccggcctgcaagagccca

SEQ ID NO: 4854 - DNA, 661 bp, Homo sapiens
  FLJ12572
  misc_feature [331]..[331]: Chromosome 15, SNP identification no. = rs1530920
  misc_feature [331]..[331]: allele = c, in linkage disequilibrium with rs1965866, respectively
  misc_feature [331]..[331]: n is a, t, c or g
aaactctaaccagacagagcccattccatctgctgtcactgaacgctgcagaactccccggcctgcaagagcccaggccgcagatggggctacttccaaacaaggccgcctgcactcagcaggctctgccctctcaaaggctgaaatgttcttggctttgaaccatttcattttaatattctttaggagatgagttataaacacaaagccaatgccctgaacacttagcagggctgggaaagctgtgaataccaagtttgtctatgctcctctgggaagctggccaggctcaggttagtgacattccaggagcctgaattgggaatctttntgcaatcacaagccttcgtgacttcttgggcagttttgtctgcataaggaatacagggaaggcacagagcaaagggatcagcttgtgcgtcgagactgaaacacttgcttcttggccagtggcgttttgttagagggcaatgccttcaatgggcatttcgcacgcaagcaggcaggctacagagaatcctcaagggagaaatttttctcattaataattattttcttcaaaaatcaaaaccaaaaccaactccccaaaagtctttgtaccccgtacaaacaggtttaagcacaggagagcagagctaagattcccccttggtgctgggtg

SEQ ID NO: 4855 - DNA, 661 bp, Homo sapiens
  FLJ12572
  misc_feature [331]..[331]: Chromosome 15, SNP identification no. = rs12595385
  misc_feature [331]..[331]: allele = c, in linkage disequilibrium with rs1965866, respectively
  misc_feature [331]..[331]: n is a, t, c or g
atgccctcagctgctgcaggttggagctgagattctccgcatgctcctgggccccaggccttcccattggcactccaaacccttttctctgggctgccttcattcttcctgtgtcccttgtctgcccacagattcttttggtgggcctaaggtgggaggagacatgtgaagtgccagaccctataacatgacatggcataaagagcctctggggtggttggctgcctgggttcatatctttaccactcactggttatgggcccttggaaaaattacctaatctctgggtgcctcaacttctccatccaacaaatggggataaatgtacctntctcatcgagttgcaaggatttctgaattaataaatgtagtgtggtgagaaccattgctggtatgccatatataagcggtagctattaatattataactgtgtgaggtcatttaattatcacacatttatcatctgtatcaagtaggtattattatcattttcaatttaagagaaggcaatagagtgctatatttagactggaaaactttttaaaaatatataactaaaattggattgcctctgattccaaaagtcatgcaaagcagagtggcctaacttcacagctatgggacaatagcattctagggcacagattcactaggtcccac

SEQ ID NO: 4856 - DNA, 661 bp, Homo sapiens
  FLJ12572
  misc_feature [331]..[331]: Chromosome 15, SNP identification no. = rs8026991
  misc_feature [331]..[331]: allele = g, in linkage disequilibrium with rs1965866, respectively
  misc_feature [331]..[331]: n is a, t, c or g
attgtggtttattctacaagttcttgattgaactccatctacatatgttaacatggttgtatttcaaaaacataccactgagtgaacgaagcaacttgtaaaaggatgcaaacaccatggcaccattgattttcaagtttcttttctggagcagaagaacccaaacaaaaccttctgtggttctcaatatacacagcaggaaagagcagaacagccgctctcacagaagcaggtggaggggcctggaagtctgactacctgctcccagctagctgccccagaagaacctccatggaacatgagggctcagggtgacacagattgagaaccncagcacatgctgggcagtgaggcttccttagggagtgagtgcaaaggacgttgacaatgctagtgtttagactacactgtctttccaaactcaaccattgttcacaattttcaaacaatgcttcatttgctgagggaatataaataccctgttacatgcatctgagagcatttaaggactaggaatcacagttaacagaattacaggcatcctgcttgcctctcctggatttctgcaagagatcaagtaatgggcctcgctggggctccatagtttgaccacactcactccttctcctcaggatttattaatctccccagggcttgcatt

SEQ ID NO: 4857 - DNA, 661 bp, Homo sapiens
  FLJ12572
  misc_feature [331]..[331]: Chromosome 15, SNP identification no. = rs8032154
  misc_feature [331]..[331]: allele = g, in linkage disequilibrium with rs1965866, respectively
  misc_feature [331]..[331]: n is a, t, c or g
ctcactccttctcctcaggatttattaatctccccagggcttgcatttcccctcatgtcttttgttcttttcagtatcttatggttacatttatcaactgtcatcttgaagctgaggaggaatgtttaatatctccaaatcccttggggtgctggcatgttggactgggttaaaaacaaaaaaaaacttctaatattccacattgaacaaggtcattaattaaaaaaaaaaaaaacaaaactcatccacaagaccaaggacctcaacccctgccaaggcacagagcagctgttccatcctggtgccttgtatgtatgtctgggggaaaccncagattcctcagtgccaatcaagctgtcgacagacacagccagagctggcaggcttttatctaactgggcctgtccccttggattggtaaaatgtgtaatatttcctaaagagaaagcctgatgactagtgaaaaggatgagagacacttctatttctgcaggcagaccccatcatctgaacactcaacttcaaaccctggaaggagtctgagtgtggaatcccagctcttggggatggggtgggtcttgggggttagggaaatatattttccccccactttgtaataatttggggttcagtgacagagcaaaatctctcctacagcaaa

SEQ ID NO: 4858 - DNA, 661 bp, Homo sapiens
  FLJ12572
  misc_feature [331]..[331]: Chromosome 15, SNP identification no. = rs9672800
  misc_feature [331]..[331]: allele = g, in linkage disequilibrium with rs1965866, respectively
  misc_feature [331]..[331]: n is a, t, c or g
gtccaggccagaaacctgggagtcatctataactcttcccttccttctttcccccacatccaatcaatctccatgtcctatcaattctgcctcctaaatctttcctatatccatctacttctcttcatctccactatcttcatcctagttcaagctaccatcattctcagctttggctacctcaatagcttcctaagtggtctagttctatggttggcacaacctccccaatccattctctacaaatcatccagaacaatctttcttaagtattggttttgaatgtgagcatgccatttattgggtatgtactcctgggcatatcactcancctctctaattcttggcttccttatctacaaatgggaaataatcatgtgtcacagggtggtaataatgattaaaagagacaatccagataaagtgagaaaaaggggcactctaacaaactgtgagtaggagtataaattgtcagacaaattaaaataagaaatattaatgaagtactctcaggaccttgtcactgtatctcacttcaaataacaagaatggattggtctgtatcttacaacttttacaggaaaaaattatcagaaaaactttcttaaaagtgcctttggcatgatacaatataaagacataaaactcactattatggtta

SEQ ID NO: 4859 - DNA, 661 bp, Homo sapiens
  FLJ12572
  misc_feature [331]..[331]: Chromosome 15, SNP identification no. = rs1377267
  misc_feature [331]..[331]: allele = c, in linkage disequilibrium with rs1965866, respectively
  misc_feature [331]..[331]: n is a, t, c or g
acccaggagtttgaaaccagcctgggcaacatgatgaaaccctgtctctccaaaaaaaaaaaaaaaaaaaaaaatctaaaacaaaaaaaccaaagtgtgtgtgtttgtgtgtgtgtgtgtgtgtgtacgtatcctattggttctgtttctctggagaactctgatggacacaacacactcactgaggaatcttataaagtagactagcagctaacagacataactctaggtggcttcaggtgaagactttagaatgtagaaaaaaagagtccttatcagttgggtaacatacgctctaaatagatattaaaggataaagcaaccccctttngagcatctcaggctgtttgtggtttgtgcaactactaacaggggacaagtaccagcacttgcccacgtgaccacctgataagaacacctttgttgagcatctactctaggccaactgttgtccttatctagagcaaatgacaaagccaggcattttcagagctgctgtgccacttgtgtctatgaaaagcattgggcctagaacagctttggtagccaggaccttgtagcttacctggaggaagtggttgatggatacatcgtggagtcccagggcttgctctacacctgctaattctctcaatatgggtacacactcacgacttgtttc

SEQ ID NO: 4860 - DNA, 661 bp, Homo sapiens
  FLJ12572
  misc_feature [331]..[331]: Chromosome 15, SNP identification no. = rs7174431
  misc_feature [331]..[331]: allele = a, in linkage disequilibrium with rs1965866, respectively
  misc_feature [331]..[331]: n is a, t, c or g
actatggtgtgggggccaaatctgctgtttttgtaaataaagttttattggcacaatgccatgcccattcgtttacatatcatccatggctgcttttgaaatatgacaagagttcattggttgccacagaaaccatatggcctacaacatctgaaatacttattatctgggcttttagggaaaaagtttgctgacctctggtctagaatctagagaaagttacatacttctaaaatgatttcagatttttttccacctaatttagcctagagaactcagacaatgccagggatatttgagagaaggaaaaaaatattcatctttttcctcntcatgttcataaaagatgcagtgtgccattgaagtaaagaatggatcctttgtttcccagactgcccgtaaaagtcacagaagagaaatgaaggaagtacaaacaccaagataatttcatctgggcaactgcttttaaagaaagcagtatttaaagtttagtaatcaagctcataaatgagcaaaaaagaaaacaataacaaggcatgcattcattgatatataaaaaattccttctttcctgagataagccactaaagaaaagtgtttgggggtttgttaataggtgaagaccacggaaaacttgtagccacctactagctatctcagc

SEQ ID NO: 4861 - DNA, 661 bp, Homo sapiens
  ADAMTS17
  misc_feature [331]..[331]: Chromosome 15, SNP identification no. = rs4567683
  misc_feature [331]..[331]: allele = g, in linkage disequilibrium with rs11247180, respectively
  misc_feature [331]..[331]: n is a, t, c or g
tcgccagcctccatccacactctagagtgtacttactgacttcacatgagttgcatcccctccagtaaaacatcaccccacaagagcaacggcctttgtttggtgccttgagtgtccccagggctggagccgggcctggcacacagtaggcactcaatagagttttactgagtatgaatgacggaaaagcagaatgtcggtgaggacaaagatccgtcctgaacacagaatctgtgatggacacagcaaaggagaaaacacagggtaaaagcaacgatgggaatttaatacctgccaagaacaaaatgaatgggcacaggtctggcagacnagaccagagttaagccctcaggctttgctgtgagatagtttgatcccagctctgtcactcgcgagtggcataatttcagacaagaaatgtattcttttagagcctcagtttccccatctgctcacaggaataatgacgcctcacttaaaatgctatcgaaaagcgagaaaggcagggcgtggtggctcacacctgtaattccagcactttgggaggcccaggagggcagaatacttgaggtcaggagttcaagaccagcctggccaacctgaaacaggtgaaaccctgtttctactaaaaatacaaaagttagccaggcgtagtggcgtg

SEQ ID NO: 4862 - DNA, 661 bp, Homo sapiens
  ADAMTS17
  misc_feature [331]..[331]: Chromosome 15, SNP identification no. = rs4246310
  misc_feature [331]..[331]: allele = t, in linkage disequilibrium with rs11247180, respectively
  misc_feature [331]..[331]: n is a, t, c or g
ggatgcttaaagctaaacctgtgagaaagggaactagtttcctaaagcctccacttttttgttttccaggcaactcaatcagccgagaaatccaagctgaatttgtgggatacgaagccctaaaatgaatagcatgcgactttcctaagtcttttaagcagatggtctattttttaatactatgatgaaaatgaaccttgccaaaaatttcttcactcttgatggctagatgtaagcatacttgattcccaaaattgaaacctttcataaaacctctcaaaaagcaaagaacatggtcaaaagcataattataaataccaaggtagcctcngacaaacagatgaatttgctaaagactgcaagttgtctaatttggaacaacgaatatgtaattaagccttcccctttgtaaccttctcagagtagacaccaacgacatagtgtggataagcccagaacagggcccaaaagtgagatgggtcctaggtaaggacaaagccacttcagaacttactcatttgaaggagtcatttgccctcgtaggcaatgtctggagactacactttttttttattgtattttatccattccatagccatatttcatcatagctttaattttgcattttgctacaggctagtgatattattttttcataagt

SEQ ID NO: 4863 - DNA, 661 bp, Homo sapiens
  ADAMTS17
  misc_feature [331]..[331]: Chromosome 15, SNP identification no. = rs4246312
  misc_feature [331]..[331]: allele = a, in linkage disequilibrium with rs11247180, respectively
  misc_feature [331]..[331]: n is a, t, c or g
gaacaaacagataggagagccccaagaagcaaagaaacccaagagctggtctagccagtaaaacttgatttgtatctttgtatctcaaacacgacttgccagcctcacccagcaaagaacacttttgacaccgctttttgacaacccaaaaccaccctcacagaatgaagacataccaacaccactgtaacacagaaaacgctggctcacttgtgacggaaattccccagagggctctacacaccaaccagtgaggacgccagggctgggataagtgaagagtcacagggtgaccaatgtggaagggacgaagcacagtcagacgggcccnttttcatatgtttgtgtttatgcataaaaagtggcatttctttcttacctaactgatgacatcacagggttcacagcttctcttcctctttgacacattcaattaataaaaactcaacaggtccagcacacaacaccgtccattacccacacccactccccctcacctcttgccagttccccagctcctcttggtttcatggcctcatggtgggctggcctgacacagatttccaaaaccgatgctttgttcccaaacaccaccgtcctggccagcaatatcccccacccgcacttcctccacccacacgctcttcctcacaccggaagg

SEQ ID NO: 4864 - DNA, 661 bp, Homo sapiens
  ADAMTS17
  misc_feature [331]..[331]: Chromosome 15, SNP identification no. = rs7171129
  misc_feature [331]..[331]: allele = c, in linkage disequilibrium with rs11247180, respectively
  misc_feature [331]..[331]: n is a, t, c or g
gtgtaatatattaaaaatcattttgtaaactctaaaatgtgacatgaatggtagctatcattatattagattttgaagggtcttgtgagtcacctaacccaaagtgatcatttgatggattaagaaaccagagtggagacacatccaaggccacccagctggcacgtggcagagccagaacaaaggcttagggctactcactgctggggctcccccagaagctcaggttttcaacatgtgaatttcataacagtatatatttttcacacctatactgttttcttcgattttactacaattctaaacatacacgattcacaattttgattcnggcaatgcaatactatatttcagcctcccgatgaacaaaggttcgcgttatggcagggaaaactggaaacacccttggcattgtgcctgtattaaccaaacactgtgtgcaaagaatggtttccatttgaaatccatgagaactcaagagcaaaccagacataactgaggacgggagagaaaggaaaatggcaggtgaaggggaaggtgagggaggggaaggtagagggggaggggaaggtagagggggaggggaaggtagagggggaggggaaggtagagggggaggggaaggtagagggggaggggaaggtagagggggaggggaagg

SEQ ID NO: 4865 - DNA, 661 bp, Homo sapiens
  ADAMTS17
  misc_feature [331]..[331]: Chromosome 15, SNP identification no. = rs4471661
  misc_feature [331]..[331]: allele = a, in linkage disequilibrium with rs11247180, respectively
  misc_feature [331]..[331]: n is a, t, c or g
tctcccagggtgtatcagccccttagattattatttcaactctaaacttaccaacagtgtcacacggttcatccttgtgtacacagaaatctgtcctaaaaaataaaaaagccatcatcaggtatatgcagtatccccaagaatgggagaagaaaacactgtgaattaacctcaagtagtcatcctgcaatgttatttttccagtggacacaggccacagcgaatgataacaaacagcagcgtttggcaacagtaatccatccacatttcccggggtaggtccacttaccccacatgagaaccttcttttacagatgaactattctatacntaacagttgctggaaggactcctttcagcagctgaaaatgttttggaagatgtttgccaagtcactgatccgagacaattctcagacaatagcatccaactgcagtggcctccccaagctactctacttccccaagctactctatttgggcagcaactggtttttgatgctgtaatgaccatgtattgctttcacaagaagacaacaaaaagtcatttctaaaaactgtattcctctactatgcagccataaaaaggaatgagatcatgttctttgcagggacatggatggagctggagcctattatcctcagaaaactaatgcagaaac

SEQ ID NO: 4866 - DNA, 661 bp, Homo sapiens
  ADAMTS17
  misc_feature [331]..[331]: Chromosome 15, SNP identification no. = rs4074098
  misc_feature [331]..[331]: allele = c, in linkage disequilibrium with rs11247180, respectively
  misc_feature [331]..[331]: n is a, t, c or g
ttttatttgctttcccctctgccagtgctgcttctatcgcctattgcttcatcttctaaaagggagtctgatggaaaaatcaagtctctaggccttttcatctctttatgatattccttctccatttccctgaaggttaccttggttttggagtgaggttatgaaaagtgtggatctcaagcgttctttgggccctgagagaagatgggtgtggggcctgggaggggccgtgtctgggccaggttgtggctcctcagccggctgagtcctgccccagccaaccctctgtggttgatccctgaccatggaaacttataaagaagcataggantgatccagtattagaaaagaagagcctagacccctggtttccccacagcaggccagatgaaccccttgtacttgcagaaccagggctggaccaggtttcaagcatctttgctgtctcactggtccacagataccacccacccaggggatcctggggagctttaaggaagacagtttttttttttccttcaccttttaagttctggggcacatgtgcaggatgtgcaggttcattacataggtaaacatgtgccatggtggtttgtagcacagatcaacccgtcacctaggtattaagcccagcatccgttagctattcttcctcatgctg

SEQ ID NO: 4867 - DNA, 661 bp, Homo sapiens
  ADAMTS17
  misc_feature [331]..[331]: Chromosome 15, SNP identification no. = rs10902566
  misc_feature [331]..[331]: allele = c, in linkage disequilibrium with rs11247180, respectively
  misc_feature [331]..[331]: n is a, t, c or g
agcccacaagcgctagaagccaggcacgcagtgtttgagcatctccgtgacaaaggaatcagccgtgtcactgctcgaattttactctttgaaaaccattattacagttaaaaaaaacctatctttgtgtgacgtaatattctttcacacaaggaaaaatagaacacattcagttgttctgttctcacttctgcgatttccaaaatctcctttcctcaggaacaactagctgttgttttcttaatactggaccatccacaagccagttctgaagtcacatattcatgtcctatccccaagcctgggggaggaggggggaggcacccaactngttcctgttttgatagttcgagaaccatccaatggctgtaattcaaattttccttaaaatattcagcatcagaattggatctaaactggtaaatttcagttcaaaacatgaaaattaggaagaatgaaaacttgaagttatgagggagaaaattcaagttgcacagtgttcactgagattgcacagcacaatctaaacactgcctgtcacgccaagcccagtcaaaaccagaaacattaaggaatactacagatttaaagaagtaacacgagaaagcaatcctcagtcatattctgatatgccacaaaaggaaagactgcaaggaacagt

SEQ ID NO: 4868 - DNA, 661 bp, Homo sapiens
  ADAMTS17
  misc_feature [331]..[331]: Chromosome 15, SNP identification no. = rs4965616
  misc_feature [331]..[331]: allele = g, in linkage disequilibrium with rs11247180, respectively
  misc_feature [331]..[331]: n is a, t, c or g
agccaggtgacaatccgacgacagccacaaaacacaaggcacaagcctcaaagacatgtaacaaagtctcgtcttcttttttttcccatggaaactcatgctcaggagaagtcttggaggcaacggctatatgtttagggagacacctggttggggagggaacagcgcagccaagcgtctggaaattccgtctccggcgtccagctctggcggcatcccagcaagtgttcagtcctggctgcgtttgtcacatttccttggcagcctaggggcctagcagggtggacctgccgcctgcagcacactacggcttctctggctaggcaatgtngggacacagcaagggaggggcagacaggtaccagagaaggagccgtggttggaggcacaaggagtggagctgctcaccacgccaggctgggcttcacaagggcaccacctacctgtgtgacccaaggcctccccccagagccacacagggacctgtgggtgacactctcaggttgcatacactgctattaagacccccaaacaggagaaagctatgctctgtagcacagtgtctgagtggggtccccaaagcagcagcaccaacatgacctgggcacttgttggaaatgcacattctggagtccaccccagcccccactgaatcagagac

SEQ ID NO: 4869 - DNA, 661 bp, Homo sapiens
  ADAMTS17
  misc_feature [331]..[331]: Chromosome 15, SNP identification no. = rs12148659
  misc_feature [331]..[331]: allele = a, in linkage disequilibrium with rs11247180, respectively
  misc_feature [331]..[331]: n is a, t, c or g
agcacagtgtctgagtggggtccccaaagcagcagcaccaacatgacctgggcacttgttggaaatgcacattctggagtccaccccagcccccactgaatcagagaccctgggtgtgggcaggtcatctgtgttgaacagtgctccttccccaccctgctccacacccaccggagtgtgggaaccagccagtgctctagcactatgctagtcttgctggtcaccagagagaggcttgtctcttccacatggtaactgagtaaaattcatgtcattttccctccaaacagaacttgcctggaacagctcaggtttttcattccactccacngtcgttaaggaagctaagaacaaccaaagctctgttaaactgccccattttccaatttggctgcccacacccacggtttctggtatcagcaccacctgcttccgtctgcaatttgttctttaaaatattcctgctcccgtgtcaccgccaccccaaccaaaggagaatcacatgatgtacacacaaaaccagcacagcacatctggaaaacccacaactgcagggccagagtgctgctgggcgcctggcccgatggagccttcgccctctacatgtacctgcacaggtgagcggtttgccagggacacagagccaggagccgaactccat

SEQ ID NO: 4870 - DNA, 661 bp, Homo sapiens
  ADAMTS17
  misc_feature [331]..[331]: Chromosome 15, SNP identification no. = rs7168602
  misc_feature [331]..[331]: allele = a, in linkage disequilibrium with rs11247180, respectively
  misc_feature [331]..[331]: n is a, t, c or g
agaccctgggtgtgggcaggtcatctgtgttgaacagtgctccttccccaccctgctccacacccaccggagtgtgggaaccagccagtgctctagcactatgctagtcttgctggtcaccagagagaggcttgtctcttccacatggtaactgagtaaaattcatgtcattttccctccaaacagaacttgcctggaacagctcaggtttttcattccactccacggtcgttaaggaagctaagaacaaccaaagctctgttaaactgccccattttccaatttggctgcccacacccacggtttctggtatcagcaccacctgcttccntctgcaatttgttctttaaaatattcctgctcccgtgtcaccgccaccccaaccaaaggagaatcacatgatgtacacacaaaaccagcacagcacatctggaaaacccacaactgcagggccagagtgctgctgggcgcctggcccgatggagccttcgccctctacatgtacctgcacaggtgagcggtttgccagggacacagagccaggagccgaactccattcccccaggtaagggcaggcagaagcatattttaaaacactaactggagcccatccctcttctgcttaagcccgtgcagcagcttcccactgcctggaatgagg

SEQ ID NO: 4871 - DNA, 661 bp, Homo sapiens
  ADAMTS17
  misc_feature [331]..[331]: Chromosome 15, SNP identification no. = rs4965299
  misc_feature [331]..[331]: allele = g, in linkage disequilibrium with rs11247180, respectively
  misc_feature [331]..[331]: n is a, t, c or g
accagagagaggcttgtctcttccacatggtaactgagtaaaattcatgtcattttccctccaaacagaacttgcctggaacagctcaggtttttcattccactccacggtcgttaaggaagctaagaacaaccaaagctctgttaaactgccccattttccaatttggctgcccacacccacggtttctggtatcagcaccacctgcttccgtctgcaatttgttctttaaaatattcctgctcccgtgtcaccgccaccccaaccaaaggagaatcacatgatgtacacacaaaaccagcacagcacatctggaaaacccacaactgcngggccagagtgctgctgggcgcctggcccgatggagccttcgccctctacatgtacctgcacaggtgagcggtttgccagggacacagagccaggagccgaactccattcccccaggtaagggcaggcagaagcatattttaaaacactaactggagcccatccctcttctgcttaagcccgtgcagcagcttcccactgcctggaatgaggctgctctccacaccctggcctccccgcctgcaaggtcggcctgcccgcttctcactgtgcccccatcaccctccccatcacccacaagcaaccagctatttctgtgcttctccaatgc

SEQ ID NO: 4872 - DNA, 661 bp, Homo sapiens
  ADAMTS17
  misc_feature [331]..[331]: Chromosome 15, SNP identification no. = rs4965617
  misc_feature [331]..[331]: allele = a, in linkage disequilibrium with rs11247180, respectively
  misc_feature [331]..[331]: n is a, t, c or g
cactccacggtcgttaaggaagctaagaacaaccaaagctctgttaaactgccccattttccaatttggctgcccacacccacggtttctggtatcagcaccacctgcttccgtctgcaatttgttctttaaaatattcctgctcccgtgtcaccgccaccccaaccaaaggagaatcacatgatgtacacacaaaaccagcacagcacatctggaaaacccacaactgcagggccagagtgctgctgggcgcctggcccgatggagccttcgccctctacatgtacctgcacaggtgagcggtttgccagggacacagagccaggagccnaactccattcccccaggtaagggcaggcagaagcatattttaaaacactaactggagcccatccctcttctgcttaagcccgtgcagcagcttcccactgcctggaatgaggctgctctccacaccctggcctccccgcctgcaaggtcggcctgcccgcttctcactgtgcccccatcaccctccccatcacccacaagcaaccagctatttctgtgcttctccaatgccagcctgaccaccactggctggttgcttatgttggcttaacaccttcccctctaaggccacctcactcctctcagagaggtggccctgatacctgtcact

SEQ ID NO: 4873 - DNA, 661 bp, Homo sapiens
  ADAMTS17
  misc_feature [331]..[331]: Chromosome 15, SNP identification no. = rs11634485
  misc_feature [331]..[331]: allele = c, in linkage disequilibrium with rs11247180, respectively
  misc_feature [331]..[331]: n is a, t, c or g
ctggttttccttctcactgatttgcatgttgaatgctgtctgtcgttcctactgcatgagctccggaggatgagacctccggtggtccctactctatcccagcagaggatgcaagggtccctagcacacactaagtacccagtaaatcaatctgagtagaatcagtcaattgtttttgtatttctggtgaaacaaacagaacataaaatttaccatctcacccactagtgcacaaccgtgtacttacctgtagtgttaattacgttcacgttattgtacaattaacctccaggactcttttcatcctccaataccgaagctctatactcangaaacactaactcccactgccccccacccaacccccattctactttgtttctatgacttggacactgcagttacctcatgtaagcagagtcatttagcacttgtgtttttgtgtcacttggcatactgtcctcaaagttcatccatgctgtggcgtgtgtgggaatttccttcctttttaaggctggataatattccattgtatggacaccccacgttttgtttatctgcccatctgccaatggacaccttggctgtttttgccatcgttcggccattgtgagtaatgctgctgtgaacacgggtgtacagatacctcttccaggctctg

SEQ ID NO: 4874 - DNA, 661 bp, Homo sapiens
  ADAMTS17
  misc_feature [331]..[331]: Chromosome 15, SNP identification no. = rs4433794
  misc_feature [331]..[331]: allele = t, in linkage disequilibrium with rs11247180, respectively
  misc_feature [331]..[331]: n is a, t, c or g
ccattgtgagtaatgctgctgtgaacacgggtgtacagatacctcttccaggctctgcttttaattcatttctttttttattttcgtggtaagtctaaatgaatatatatttataatgtcaacatttactttagattcaggggtatgtgtgcaggttggttacgtgagtatattgcgtgatgctgaagtttgggatacgaatcaccccatcacccaggtactgagcatagtacccagaggtagttcctcagcccttgcccccctccctgtctcccttctctagtagtccgcagtgtctgctgccaccttttaaaaaattttatttctaatntttgtgggttcatagtaggtgtatacatttatggggtacatgaaatattttgatacaggcatacaatgcataattatcacatcagggtaaacagagtacctatcaccttaagcatttatcctttgtcttacagacaatacatttacacttttagttattttaaaatatacaattactgactatagtcaccctgttgtgctatcaaatactgtaacttatccatttttgtaactattttattgttgccatctttatatccacatgtacccagtgtttagctcccacttatgagtgagaatatgcagcatttggttttctgatcccgcatta

SEQ ID NO: 4875 - DNA, 661 bp, Homo sapiens
  ADAMTS17
  misc_feature [331]..[331]: Chromosome 15, SNP identification no. = rs7403309
  misc_feature [331]..[331]: allele = t, in linkage disequilibrium with rs11247180, respectively
  misc_feature [331]..[331]: n is a, t, c or g
caggtactgagcatagtacccagaggtagttcctcagcccttgcccccctccctgtctcccttctctagtagtccgcagtgtctgctgccaccttttaaaaaattttatttctaatctttgtgggttcatagtaggtgtatacatttatggggtacatgaaatattttgatacaggcatacaatgcataattatcacatcagggtaaacagagtacctatcaccttaagcatttatcctttgtcttacagacaatacatttacacttttagttattttaaaatatacaattactgactatagtcaccctgttgtgctatcaaatactgtancttatccatttttgtaactattttattgttgccatctttatatccacatgtacccagtgtttagctcccacttatgagtgagaatatgcagcatttggttttctgatcccgcattaattcacttaggataatggcctttagctgtatccatgttgctgcaaaggacgtgagttgttcttttttacagctgtgtagtattctatggtgtatatgtaccacattttcttttatctagtttaccactgatgggcatctaggttgattccatgtctttgctattgtgaacggtgctgtaatgaacatatgcatgcatgtgtttttatggcagaa

SEQ ID NO: 4876 - DNA, 661 bp, Homo sapiens
  ADAMTS17
  misc_feature [331]..[331]: Chromosome 15, SNP identification no. = rs7171164
  misc_feature [331]..[331]: allele = t, in linkage disequilibrium with rs11247180, respectively
  misc_feature [331]..[331]: n is a, t, c or g
tctgactttttaataatgaccattctcactggtgtgagatggtatcttgtggtattgatttgcgttgctctgatgattgctgatgtggagcatcttttcacatgtttgttggccgtgtgtatgtcttcttttgagaagtgtcagttcatgttttttgcacactttttaatggggttgcttttgcactgtttaaattccttatagattctggatgttagacctttgtcagatagtttgcaaatattttctcccatcctgtagcttgtattcttattaaactaccaacatcattttcacagaattagaaaaaactattctaaacttcatatanaaccaaaaaaggggcagaacagccaaagcaatcctaagcaaaaataataaagccagaagtatcacattacctgacttcaaactatactagaaggttacagtaaccaaaaaacatagcacttatacaaaaacaagacacacagaccaatggaacagaaacaggaacccagaaataatgccacatcatacctacaaccatctaatctttgacaaagttaacaaaaataagcaatagggaaaagactccccactcaataaatggtgctgggatagctagctatatgcagaagaatgaaactggacccctatttttcaccatatacaaaaatga

SEQ ID NO: 4877 - DNA, 661 bp, Homo sapiens
  ADAMTS17
  misc_feature [331]..[331]: Chromosome 15, SNP identification no. = rs4965302
  misc_feature [331]..[331]: allele = g, in linkage disequilibrium with rs11247180, respectively
  misc_feature [331]..[331]: n is a, t, c or g
ggtaaaggattcatgactaagtcctaaaagcaattgtaacaaaaacaaaaattgacaagtgagatctattaaactaaagagcttctgtacagcaaaagaaactatcagttcatttctttatgtacccaggagtagaggtgttgggtcatatgtcatatgaataagcttcttttatactctagcctctgtggtaactagacacattgctgggattttgattgattgactgatctttaatttttacttttttaggggccaaacagcatctattgctgtattcattgaggaaaactgctcccaggaggtgagctctagagaatggcaaggaccntcttcccaccattgaaacctcagtggatagagactcactctgcccgccctcgcagccccagagcagtcctgttccctggattcccttcggggctctgattcctggaggagggacagtagacagtcaggagatgttcttgggacagagaagcggcagcaggaatccagcctgagaggtcaagcctgcatgaccagccctcactcctcacctgaccttagccttcatctctcctgcttcctggcctcccaagttccctccaaactttccccaaactctgagcttggagactcggtcttcattttgattctggatgcctccctctatacctcc

SEQ ID NO: 4878 - DNA, 661 bp, Homo sapiens
  ADAMTS17
  misc_feature [331]..[331]: Chromosome 15, SNP identification no. = rs7184029
  misc_feature [331]..[331]: allele = c, in linkage disequilibrium with rs11247180, respectively
  misc_feature [331]..[331]: n is a, t, c or g
tgttgggtcatatgtcatatgaataagcttcttttatactctagcctctgtggtaactagacacattgctgggattttgattgattgactgatctttaatttttacttttttaggggccaaacagcatctattgctgtattcattgaggaaaactgctcccaggaggtgagctctagagaatggcaaggaccttcttcccaccattgaaacctcagtggatagagactcactctgcccgccctcgcagccccagagcagtcctgttccctggattcccttcggggctctgattcctggaggagggacagtagacagtcaggagatgttctngggacagagaagcggcagcaggaatccagcctgagaggtcaagcctgcatgaccagccctcactcctcacctgaccttagccttcatctctcctgcttcctggcctcccaagttccctccaaactttccccaaactctgagcttggagactcggtcttcattttgattctggatgcctccctctatacctccaaaactgggattccttttctacttcagccagcccagatccagcccctgttgcttgtaatcaaaatccccaaccaatacaagaagggccaaatgcattgctctagggtttacaagactcctttcttccttgttcaaaaa

SEQ ID NO: 4879 - DNA, 661 bp, Homo sapiens
  ADAMTS17
  misc_feature [331]..[331]: Chromosome 15, SNP identification no. = rs5011255
  misc_feature [331]..[331]: allele = a, in linkage disequilibrium with rs11247180, respectively
  misc_feature [331]..[331]: n is a, t, c or g
atccccaaccaatacaagaagggccaaatgcattgctctagggtttacaagactcctttcttccttgttcaaaaatgagaccactttgcatgacgccagttttctctgggacctcttccaggcttcataagctcttaaaaacggccaaggtggatctgctctgactgcagccatttcttctgtgactctggagccatttcttctgtgactctggagccatttcttctgtggctctggagccatttcttctgtgactctggagccatttcttcaatagggtgtggatgagaagccatttgtagccgccaggcattctttcttggtgcagttnttctttttaaccatgcttgttttatcttctccatcttgtaccaccctcggtaaaagacaagacctagaggagatggcccatagttcagcagcctacctcaggggctgtgtaggaagtataagtgtattattatatttatgcataaacactttcaaacagagtttaatacaccatatccgtgggatgtgcttagaatacaaaaggctctccagaagcaaatttgcctaggaattaaaaaagtaaagccagtgtttgtttctgtgacttcagcactgaatccttcgcaaaggatgctggtatatggcatcagtcattcatttatgcattcac

SEQ ID NO: 4880 - DNA, 661 bp, Homo sapiens
  ADAMTS17
  misc_feature [331]..[331]: Chromosome 15, SNP identification no. = rs5011256
  misc_feature [331]..[331]: allele = g, in linkage disequilibrium with rs11247180, respectively
  misc_feature [331]..[331]: n is a, t, c or g
caggcttcataagctcttaaaaacggccaaggtggatctgctctgactgcagccatttcttctgtgactctggagccatttcttctgtgactctggagccatttcttctgtggctctggagccatttcttctgtgactctggagccatttcttcaatagggtgtggatgagaagccatttgtagccgccaggcattctttcttggtgcagtttttctttttaaccatgcttgttttatcttctccatcttgtaccaccctcggtaaaagacaagacctagaggagatggcccatagttcagcagcctacctcaggggctgtgtaggaagtntaagtgtattattatatttatgcataaacactttcaaacagagtttaatacaccatatccgtgggatgtgcttagaatacaaaaggctctccagaagcaaatttgcctaggaattaaaaaagtaaagccagtgtttgtttctgtgacttcagcactgaatccttcgcaaaggatgctggtatatggcatcagtcattcatttatgcattcactgactacacaaatatttctggatcatctcctgcatgcgtaccaggcactgacaaaatgttgatggtgtagacataggcctaccttgatgagcttatggatactgcaaaggcaggtgat

SEQ ID NO: 4881 - DNA, 661 bp, Homo sapiens
  ADAMTS17
  misc_feature [331]..[331]: Chromosome 15, SNP identification no. = rs12901824
  misc_feature [331]..[331]: allele = t, in linkage disequilibrium with rs11247180, respectively
  misc_feature [331]..[331]: n is a, t, c or g
aaaagtaaagccagtgtttgtttctgtgacttcagcactgaatccttcgcaaaggatgctggtatatggcatcagtcattcatttatgcattcactgactacacaaatatttctggatcatctcctgcatgcgtaccaggcactgacaaaatgttgatggtgtagacataggcctaccttgatgagcttatggatactgcaaaggcaggtgatatgtaggatgtttttaaaaattgtggtaaaatatgcataacataaaattttaccattttaaacatttttaagcttacaattaagtgacattaaatatattcacactgttatacactancactactacctatccccaaaactttcttcatcttgtaaagctgaaactctgtacccattagacaactcttcattccctcctccctctcagccatctggccagcgctattcgactttccgtctctgtgaattcactaccctacgtaagtggaatcacagtatttgttctttggtgactggctcatttcacgtagcataatgtcttcacagctcatctatgttacagcatgtgtcagaattgttttcctttttaaggctgaataatattccattatacctatacgctatatttatttacctacgcatccatctgtggacactttgggttgct

SEQ ID NO: 4882 - DNA, 661 bp, Homo sapiens
  ADAMTS17
  misc_feature [331]..[331]: Chromosome 15, SNP identification no. = rs11247180
  misc_feature [331]..[331]: allele = a, g
  misc_feature [331]..[331]: n is a, t, c or g
tcacaccaagcaaacaaaggcgcctgtggcctgggccagcccaggctctgcaccttcgctagacctcaagaccttggctgcagctggcccaaaggccctgcagattccgggaataggcatgtcatctccctaccccacaacccacggctgctgtgtccccactgaaaactcaggccctgggtcattccccactgcacccatttcgtttaaccttgccctgtcctctcgcgtcactcccttccataagcggcctgaccatttgtggccaggcactgtgcactcactgtggccagagctaaattcctgacctgctgataagcagcagactganagaggttcttctgttatggctgggcaggagtctggcccaggcctgaggctaaacctcacactcggaaccttcgcacccctttccctctacaaagttccccttgacccagattccacctgactaggcttctctctcctctcctttagccaagatcagcaacttggctgtttctacagctgagttgtagctgtttctgcttctcatttcccattcacttttcagtttgtcctcatcaagcatctacagacaacactccctaatgccattccatctggcattgttaaccaggctcctcctgcacctgtcaccccttcttcaggacaacctcct

SEQ ID NO: 4883 - DNA, 661 bp, Homo sapiens
  ADAMTS17
  misc_feature [331]..[331]: Chromosome 15, SNP identification no. = rs4965622
  misc_feature [331]..[331]: allele = g, in linkage disequilibrium with rs11247180, respectively
  misc_feature [331]..[331]: n is a, t, c or g
cactccctaatgccattccatctggcattgttaaccaggctcctcctgcacctgtcaccccttcttcaggacaacctcctcccaggtcgttgccccatcccccccagggctggtgctccatgggctgtctttggacagcttctctactcactgacacatttcagccaggcagtgctactcactccgctacttcagctgctgctgtaggctgaaaagcccaggtccctctttcccaccaagacatctgtcctgatttcccaccttgaattcagcttgtccagaatggaaactctttgctgtggccccatattcattgctcctccttttctcngacaatggctccaccacccacccagaggcccagcttgaagcctgggtgtagtagcctggatttctcttgcctcctcttcctgactctccaacccccacatcctgccagtcaccaattcctgcagctccttccttttaccccaggccctcctccattcccactccaacctctcccacactcacgccagccccaatgctccacaacactgcttcccattccaatccatcctgcatgcagctgctgggctgttcttcctaacatcaacctcggcacactgctcccctccccttcagtggtcccacttctcagggtggagcccctgctcctcaa

SEQ ID NO: 4884 - DNA, 661 bp, Homo sapiens
  ADAMTS17
  misc_feature [331]..[331]: Chromosome 15, SNP identification no. = rs4965623
  misc_feature [331]..[331]: allele = t, in linkage disequilibrium with rs11247180, respectively
  misc_feature [331]..[331]: n is a, t, c or g
gtccagaatggaaactctttgctgtggccccatattcattgctcctccttttctcagacaatggctccaccacccacccagaggcccagcttgaagcctgggtgtagtagcctggatttctcttgcctcctcttcctgactctccaacccccacatcctgccagtcaccaattcctgcagctccttccttttaccccaggccctcctccattcccactccaacctctcccacactcacgccagccccaatgctccacaacactgcttcccattccaatccatcctgcatgcagctgctgggctgttcttcctaacatcaacctcggcacantgctcccctccccttcagtggtcccacttctcagggtggagcccctgctcctcaagatgcctggcccgccctccctcaccaggccctgtccacaacttccacacccttatggctccccgttcccgccatgtcaaatgacttggtccttaaaaacacctgggaaaatgaatgggtgggtaaagctaggatgcccttgaaggtccttcagtgtctaacatttgaggagtcagcctcaccacccatccatccccatttgacaaatcggacatagacagacgtgggcatcctgactccttccttggttctctcaactaggcagcctctctaagt

SEQ ID NO: 4885 - DNA, 661 bp, Homo sapiens
  ADAMTS17
  misc_feature [331]..[331]: Chromosome 15, SNP identification no. = rs2120030
  misc_feature [331]..[331]: allele = t, in linkage disequilibrium with rs11247180, respectively
  misc_feature [331]..[331]: n is a, t, c or g
cctctgggagagcacccagcgcagggtcgaccacagagtcggggcttgatgagggcttgcagagcgacagttgtcctttcccagttggtatgagtgcagtagaagcctcgttcttcctggctgggagtctggagctgacatcctcaaatgtggctggaaggggacagcagtagaaactgagggaggcagtcttcagtgggcctgggtttcttcattttatgtttcaattttttctcatttcaaggaaatcttcccttgactctaggaccttctagctgcattcctgtctctctcctccccagacttctccaaagtttgcgccatttcctcncgggccaaacatgcattcaaccctctctagtctggttttcgcctgcatctgtccccacgagcactctcactgagaccccccacccccacaccgtgactccctgttgttcagtcagcccctccttccttccttcctgggcactctgctgtgttggagacgccacgcagccctgcctctcaggacttcactttccctggttcttgggatgtcatgctctgctcttgtcgtagcttggccttctttgtctctgtctctgtagtgttatttccatctcttctatctagccatgtggttttgaggtctctaaaggattcgtctggaactgatgat

SEQ ID NO: 4886 - DNA, 661 bp, Homo sapiens
  PCSK6
  misc_feature [331]..[331]: Chromosome 15, SNP identification no. = rs1495273
  misc_feature [331]..[331]: allele = c, t
  misc_feature [331]..[331]: n is a, t, c or g
agaagacatactcaaaaacattataaaccaagtgagattttaaaaagtgttcaagtaacccacaggaaggcaggaaaaaaaaaacagagaaactaaatacagaggaaaataatagagaagttaaaatggcagacttaacccctaatgtatcaataattacattaaatattaaccatctaaatatagtaactaaaagagattggcaagtgaatctaaaaacatggcccacgtttgacagcagaccggggggctacagttagcaacaatatgttaaatatttcagtgtagaagagaggacttgaaatgttaccaacacatagacatgataaanacccaagatgacggataccccaaatgccttgacttgatcattctgcattccatgcatgtagaaaacattcacaggtacctcttaaatatgtgaaatgtcatttatcaataaaagaaaaaagaggcaatttctactgtattgtactcttcaaattaataaaaatttttataaaagaaaaataaattttaaaaaatggcccaaatatatgttatctacaggagactcaattcaaatataacaatataggcaagttgaaagtaaaaggatggaaaaacgtatactgtacaaccattaatcaaaggaaagtagaagtagctatattaatatcag

SEQ ID NO: 4887 - DNA, 661 bp, Homo sapiens
  PCSK6
  misc_feature [331]..[331]: Chromosome 15, SNP identification no. = rs1495271
  misc_feature [331]..[331]: allele = t, in linkage disequilibrium with rs1495273, respectively
  misc_feature [331]..[331]: n is a, t, c or g
ggatagagttgggactgtcagagctgctggaaattgagaggagaaatttcagaaaggagagatctacagaagagaacatataaactcctcacaaccacttggctgaaccctgaagtatacatgggcaacccactaagaagtccagtaggaaaacagcagctgagaggctggaggagctgagcaggtatttcagctgctgcccactacagggcagtccatctggagtttcagacttgctaagttagaggtctgggtttaaacatttcaggctttccactgaaataccaaaagggtcatggtctaggagtaaagaccatatgctagggctaanggattttccctaaggctatgcgaaaatcagaaagatagcaaacattaaaaaaaagaataatcaggtctccacaagctcacatttaaccaactgctagaacgaaactttttttttttttttgagacggagtctcgctctgtcgcccaggctggagtgcagttggcgcgatctcagctcactgcaagctctgcctcccgggttcacgccattctcctgcctcagcctcccaagtagctgggactgcaggcgcccgccaccgcgcccggctaattttttgcatttttagtagagatggggtttcactgtgttagccaggatggtctcaatctc

SEQ ID NO: 4888 - DNA, 661 bp, Homo sapiens
  misc_feature [331]..[331]: Chromosome 16, SNP identification no. = rs2745189
  misc_feature [331]..[331]: allele = c, in linkage disequilibrium with rs2575357, respectively
  misc_feature [331]..[331]: n is a, t, c or g
cagcactgccctccgcctttcccacatgagctgtacactctgcatctggtttcttccctggatgcggtgttttggaggctcatccatgccgtgacacggagtaatgcttcgtgctttgcagctgaacgatgctccgctctgtggccacatttgttcatggcgcctccttagttgctggaggcttggactgtttccatttggggttactgtgaaaaatgctactctatttgtgtgcaagtctttggacacaggtttcatttttcttgggtacagtcttaggagtggagttgctggttcatagtgttgtatctcctttaaaaaactgttttcnagtgtgggcataattttttttttttttgagacagagtcttgctctgtcccccaggctgaagtgcagtggcgtgatcttggctcactgcaagctctgcctcctgggttcatgccattctccaccctcagcctcctgagtagctgggactacaggcacccaccaccacgcctggctaattttttgtatttttagtagagatggggtttcaccgtgttagccaggatggtctcgatctcctgacctcgtgatccatctgcctcggcctcccaaagtgctgggattacaggcgtgagccaccacacccggcccccatatttttttagacagaat

SEQ ID NO: 4889 - DNA, 661 bp, Homo sapiens
  misc_feature [331]..[331]: Chromosome 16, SNP identification no. = rs1742450
  misc_feature [331]..[331]: allele = t, in linkage disequilibrium with rs2575357, respectively
  misc_feature [331]..[331]: n is a, t, c or g
cgtgctatgaacagacacttttaccttttcctttcctctatatatatatatatatatatatatatatatatatatatatatatttagcatcttattaaaccccttgttcctgcctttagagggaaccatcgtcacccaccatgaattacgctgccagctgtgtttctcacggatgctatgggaggcagaatagtgctcaccgcaaagatggccacattctaacccctgggccctgggatgatgtgaggccacaccaacaagaggcggtgccaatttcaggtcagttccccaaaatggagtagcatggcttttccagatgaacctagggagntgcgcggtccttaaaagcagaggaggagttgccttgaggcacggaggactcgacctgctgttgctggctttgaagatggcaggaagggccacgagccaagggtgcctgtggaaaggatggggatacagagcctcccccagggcctctgcagggaacgcaaccctgcccacaccttccttttagtcccatgagacccatgtcaaactaccgacctccaaaccgcaaggtacacttgggttttggtttttgggtttgtttttttttttgagatggagtattgctctgtcacccaggctggaagtgcagtggcacgatcttgggtcactgcaa

SEQ ID NO: 4890 - DNA, 661 bp, Homo sapiens
  misc_feature [331]..[331]: Chromosome 16, SNP identification no. = rs1742453
  misc_feature [331]..[331]: allele = a, in linkage disequilibrium with rs2575357, respectively
  misc_feature [331]..[331]: n is a, t, c or g
cctgcctttagagggaaccatcgtcacccaccatgaattacgctgccagctgtgtttctcacggatgctatgggaggcagaatagtgctcaccgcaaagatggccacattctaacccctgggccctgggatgatgtgaggccacaccaacaagaggcggtgccaatttcaggtcagttccccaaaatggagtagcatggcttttccagatgaacctagggagctgcgcggtccttaaaagcagaggaggagttgccttgaggcacggaggactcgacctgctgttgctggctttgaagatggcaggaagggccacgagccaagggtgcctntggaaaggatggggatacagagcctcccccagggcctctgcagggaacgcaaccctgcccacaccttccttttagtcccatgagacccatgtcaaactaccgacctccaaaccgcaaggtacacttgggttttggtttttgggtttgtttttttttttgagatggagtattgctctgtcacccaggctggaagtgcagtggcacgatcttgggtcactgcaacctccacctcctgggttcaggcacttctctggtctcagcctcccaagtagctgggattacaggcatgtgccaccacacctggataatttttgtatttttagtagagat

SEQ ID NO: 4891 - DNA, 661 bp, Homo sapiens
  misc_feature [331]..[331]: Chromosome 16, SNP identification no. = rs8047464
  misc_feature [331]..[331]: allele = c, in linkage disequilibrium with rs2575357, respectively
  misc_feature [331]..[331]: n is a, t, c or g
cggagtcttgctcttttgccccggctggagtgcagtggtgcgatctcagctcactgcaagctccacctcccaggttcatgccattctcctgcctcagcctctctagtagctgggactacaggcgcccaccaccatgcccggctaattttttgtagttttagtagagacggggtttcaccatgttagccaggatgagtctggatctcctgatctcgtgatccacctgcctcagccttccaaagtgctgggattacaggcgtgagccactctgcccggccaagtcctgttcatttctgtaggattggtagtgatgtcccctctttcatgcttntggtagtcagtctagctaagagtttgccaattttgttgatcttttcaaggaaccaacttttggtttttctgctttctagtttactaatttcctctctaatctttctttaggtttcatttgttcttctttctaatttaaggtagaattgtactttttttcttttttgagacaaagtctcactctgtcactcaggctggagtgcaatggcatgatcttggctcactgcaacctctgcttcccatgttcaagcgattctcgtgcctcagcttccagagtagctgggactacaggcacatgccaccacgcccagctaatttttgtatttttagt

SEQ ID NO: 4892 - DNA, 661 bp, Homo sapiens
  HAGH
  misc_feature [331]..[331]: Chromosome 16, SNP identification no. = rs1742430
  misc_feature [331]..[331]: allele = g, in linkage disequilibrium with rs2575357, respectively
  misc_feature [331]..[331]: n is a, t, c or g
taggggttgcctttgtcctgcccttccctcatagaccctctgccaccagccacacccagagccggggcaggacatgtggccacctacccagccctcccggggtcacaggccgagagcactccccagctggctgcttccccagagggcggtttgtgctttctcaagcagaggcaggtgggtgctgccgagtaggagcactgcctggaggtcgcgcgatctggccgcctccaggaagaagacgcggccacctctccctgccgggggcctgagcagatcagaccacaagcacaggctgcaaaggtaccgaccgcagcagtgggcctgacagtcncatcagcacccagccaaggccacagcaaaggcaccggctcacgcctgacctgaagcgtgggtggggggactgcagtggctcacggaggaggaaggaggcccgaggggacaagcagaggcctaaaggccagaagaaaacagtctgcaaggggaagttatgggaataaatacttgttaaacttctcttataaatatgcattagaatgtccgataacacaagccaagggctgtaaaattaaggttaaatcaagactgaatttcccgcacggaccagcaggaaagccagttacctaaaagagcctaatccccaaatccgctgaaggtgcagggc

SEQ ID NO: 4893 - DNA, 661 bp, Homo sapiens
  HAGH
  misc_feature [331]..[331]: Chromosome 16, SNP identification no. = rs1628812
  misc_feature [331]..[331]: allele = c, in linkage disequilibrium with rs2575357, respectively
  misc_feature [331]..[331]: n is a, t, c or g
agttatgggaataaatacttgttaaacttctcttataaatatgcattagaatgtccgataacacaagccaagggctgtaaaattaaggttaaatcaagactgaatttcccgcacggaccagcaggaaagccagttacctaaaagagcctaatccccaaatccgctgaaggtgcagggcggcctcagtcccggggcatcttgaactggtccttctccctgcgcacggcccgcatggtggtcaccgggtccgtctcacctgcgtgctgctgcaccgtcttctccctgcggaggccagcaccgggctgcaggctgtgccgagccacgcccaccngaggagccagggccactgcagaggaaggcgactcgtgctggccgagcccagccctcagaggacacggagggcggggaggcggcagccactccccttctgacaggttctgaactccagggtccagaaggactcacaccccggccaaggtgccaggaaaggccggacccccctcaagaagagtgctcgggctctgcggctgcacctgtgacagctccccaaggcagcctcagccatctggggtctcggacgtaccggctgtgtgtgcagcagtgggactgccagaggggaggggcccgcgcccaccacctgccctgggcctcacctcactct

SEQ ID NO: 4894 - DNA, 661 bp, Homo sapiens
  HAGH
  misc_feature [331]..[331]: Chromosome 16, SNP identification no. = rs1742442
  misc_feature [331]..[331]: allele = g, in linkage disequilibrium with rs2575357, respectively
  misc_feature [331]..[331]: n is a, t, c or g
actccccttctgacaggttctgaactccagggtccagaaggactcacaccccggccaaggtgccaggaaaggccggacccccctcaagaagagtgctcgggctctgcggctgcacctgtgacagctccccaaggcagcctcagccatctggggtctcggacgtaccggctgtgtgtgcagcagtgggactgccagaggggaggggcccgcgcccaccacctgccctgggcctcacctcactctcatgaaggggttgtaggtaaactcctctgccagggtggatggcactgtgggctccccgatgctgtacttctcctgcaagagaaacgcnccactttatcacgggaacttcacaggatggcagaccaggcacggaggctcacgtctgtgataccagcactttgggaggctaaggcagatggatcacttgagccctggagtttgagaccagcctggacaacatggcgagaccctgtgtctactaaaaatacaaaaaactagccaggcatggtggcaggcacctgtggtcccagctactcagggggctgaggtgggaggatcgcttgagcacaggtcgaggctacagtgagccaagactgtgctactgccctccagcctgggtgacagcgacatcacgtctcaaaaaatgcttcagaacacc

SEQ ID NO: 4895 - DNA, 661 bp, Homo sapiens
  HAGH
  misc_feature [331]..[331]: Chromosome 16, SNP identification no. = rs8046750
  misc_feature [331]..[331]: allele = g, in linkage disequilibrium with rs2575357, respectively
  misc_feature [331]..[331]: n is a, t, c or g
aggggaggccacccaagcccctgcaggcaggcagctggtcacctcctctcgagatggagatggtctcccttccgaccagcactgaccagggcagatggggtgggggcggggggaggagaatgcaaacccagccacggggccaacagttagcaggaaaacacagggcggcaacagcggggtctccacacagccccggcccttctaccgcagccgcaccaggagggcctcagggcagagctctgacagaagctgctggtgcccacgcacaggctcaagaccaccgcgcctcacccccgaggttccccacccgctatgggcagtggtgtcggtnagtgactcttcagctggtagagctgcaccaagcgggggtctggtagatgccaagatggtttctcactaatctgttcttcccttctggcgaaaagaatctgagaatgttttaaaatattccctgtgttcccaccaacattctcaatcctaagaaatctccctctgcctcctacgagggaagcaaagttaacacttctaaggagacctttaaaacagaggaagtacaaattgtcataagcttttaggttacctattaaaacgagttttaatgttctagctatttttcctacaaagtacgaagcatttaaagacaaaaataaggtcagtcagc

SEQ ID NO: 4896 - DNA, 661 bp, Homo sapiens
  HAGH
  misc_feature [331]..[331]: Chromosome 16, SNP identification no. = rs4786635
  misc_feature [331]..[331]: allele = a, in linkage disequilibrium with rs2575357, respectively
  misc_feature [331]..[331]: n is a, t, c or g
acttgggaggctgaggcatgagaatcgcttgaacccgggaggcaggggttgcggtgagccgagatcgcgccattgcactccagcctgggcggcaagagcgaaacgctgtctcaaaaaaaaaaaaaaacaaaaaaaaaacacacaaattgtcaaaatcaggaatgaaagcaggaatatcattacagatccagcagacatttggggggtgggagttcatactaagttttaaaactatacaaattccaaaaataaaatacaggagaaaattttttgaccttgggataaacaaagatttcttagatgggagacaaaaaagaatgaagcataaaanaatctattggacttcattaaaattaaaaatgttggctcaaaagatactgctaagaaaaccagaggccgcagaatgggaggcgccctgcaggaggcggcctctcaccagggactgggctccagcacctcctttcaaacggctggctccaccgcgtgggctggctccaccgtgtggtgtgccgaaagacacggaccagctggtgtgcccacgccttcccagcaggaaagcaaacaccacaagcaccggggaaggggagtttggcagtttctttaaaagtcaaacacacctcccgtccagcccggccactcccttctcctgggtgttcacacg

SEQ ID NO: 4897 - DNA, 661 bp, Homo sapiens
  HAGH
  misc_feature [331]..[331]: Chromosome 16, SNP identification no. = rs2575357
  misc_feature [331]..[331]: allele = c, t
  misc_feature [331]..[331]: n is a, t, c or g
agttcccacaggatctggttgtttaaaagaaacttttgcctcccccactctctccttcctctggccacatgcttcacacccaccagctcctttcgccttctgccatgagcagaagcagcctgaggcctcaccaggtgcagacgcccaggccatgctgcttatatagcctgcataaccatgagccacataaacctccttttataagtcacccggcctcaagtattcctttatagcaacaccacacagactaagacacccaggaagttaatacgcatccactgtatttataactagtatcaacaaataatcatgaccagaagtgcttaggganccatttagtaacacgtgcaagaccttgaacacgcaaatttcaaaacactgctgagaaaagctaaagacattcatagatggaaagctcacagaaacactcaatgttaagatcgcaattctcgccacatcagttatcacaacagtcccaatcagcagccaggctagcttttctgatagaagttcacgagatgattctgaaaacggaaatgtaaaaggcttaaaacaactaaaaccattttgaaaaagaacactggaggattcacacataccagtgccaagactcagcacagagttacagtcatcaaggtgctgtcctcggacaccgtggcaa

SEQ ID NO: 4898 - DNA, 661 bp, Homo sapiens
  HAGH
  misc_feature [331]..[331]: Chromosome 16, SNP identification no. = rs12597098
  misc_feature [331]..[331]: allele = c, in linkage disequilibrium with rs2575357, respectively
  misc_feature [331]..[331]: n is a, t, c or g
tgacgggcacctgtagtcccagctacttgggaggctgaggcaggagaatggcttgaacccgggaggcagagcttgcagtgagatgagatcacaccactgcactccagcctgggcgacagagcaagactttgtctcaaaaaacaaacaaataaatatatatatgtatatacacacacacacacacacacacacacatatatatatatatctcacaaagacttgtttccagatgatataaggaactcttacaagagcagcccaacaggccaaacccaatatttaaaatggacaaaagattgaacataaacttcatgagaaggcatccaaaggncgacacacatgaaaagatggtcacatggggaaatccacattttaaaggcagtgagacgccaccacaggcaagttagaatggcaaaaattggagagaccgacaacaccaagcagtgctggcacagcatggaggccccggaactcaagcattggtgggggactgtagaacagtacaaccatttttggaaaacggttcacacctttaaccacacaacacagcaattccactcttaggtagtatccaagagcaataaaaacatgttcacaaaagacttgtacacaaatgtccatagcagctttattcaaatagcaaaaaactggaaacagacaa

SEQ ID NO: 4899 - DNA, 661 bp, Homo sapiens
  HAGH
  misc_feature [331]..[331]: Chromosome 16, SNP identification no. = rs12597803
  misc_feature [331]..[331]: allele = c, in linkage disequilibrium with rs2575357, respectively
  misc_feature [331]..[331]: n is a, t, c or g
ttttttttttttttttttttgagacggagtctcgctctgtcaccaggctggagcgcagtggagcgatcttggctcactgcaacctctgcctcctgggttcaagcgattctcctgcctcagcctcctgagtagttgggattacaagcgtgagccaccacgcccggccagcagggagaatttcttgaacccgggaggtgctggttgcagtgagccgagattacgccactgtactccagcctgggcgacagagggagactccgtctcaaaaaaaaattaaaaaaaaaaaaaagatgagtatttatgattcatctgatttagagttggaatttgnatgagtaaatactgtaaaataatgttaacctctactctaagaaattgaaaaagatgctcaaaaaaccgggtgatttatttaaaacaaccctgtcagaggcagcgactctcactccactcagcagagggagcccacgcctgagaccacccaggcgtgcgtgcttgtgacaccgtttccagtgaattcggggaaacacacccctggagaaccccgtcctgctcctggcagactttggcccagctggcctgggctacgccatggaggctcacgtggggccaccgtggagataagagtcctttggacacagagccacgttctgtggcctggaga

SEQ ID NO: 4900 - DNA, 661 bp, Homo sapiens
  HAGH
  misc_feature [331]..[331]: Chromosome 16, SNP identification no. = rs12596094
  misc_feature [331]..[331]: allele = t, in linkage disequilibrium with rs2575357, respectively
  misc_feature [331]..[331]: n is a, t, c or g
cctgggttcaagcgattctcctgcctcagcctcctgagtagttgggattacaagcgtgagccaccacgcccggccagcagggagaatttcttgaacccgggaggtgctggttgcagtgagccgagattacgccactgtactccagcctgggcgacagagggagactccgtctcaaaaaaaaattaaaaaaaaaaaaaagatgagtatttatgattcatctgatttagagttggaatttgcatgagtaaatactgtaaaataatgttaacctctactctaagaaattgaaaaagatgctcaaaaaaccgggtgatttatttaaaacaacccngtcagaggcagcgactctcactccactcagcagagggagcccacgcctgagaccacccaggcgtgcgtgcttgtgacaccgtttccagtgaattcggggaaacacacccctggagaaccccgtcctgctcctggcagactttggcccagctggcctgggctacgccatggaggctcacgtggggccaccgtggagataagagtcctttggacacagagccacgttctgtggcctggagagccagcagagccacgtgctgccagcctgaccctactgctcagaatgtgggaacaggctgggcgctttttacacacgcagcgtctgaggcct

SEQ ID NO: 4901 - DNA, 661 bp, Homo sapiens
  HAGH
  misc_feature [331]..[331]: Chromosome 16, SNP identification no. = rs2076451
  misc_feature [331]..[331]: allele = g, in linkage disequilibrium with rs2575357, respectively
  misc_feature [331]..[331]: n is a, t, c or g
aaaccgggtgatttatttaaaacaaccctgtcagaggcagcgactctcactccactcagcagagggagcccacgcctgagaccacccaggcgtgcgtgcttgtgacaccgtttccagtgaattcggggaaacacacccctggagaaccccgtcctgctcctggcagactttggcccagctggcctgggctacgccatggaggctcacgtggggccaccgtggagataagagtcctttggacacagagccacgttctgtggcctggagagccagcagagccacgtgctgccagcctgaccctactgctcagaatgtgggaacaggctgggcnctttttacacacgcagcgtctgaggcctactccagaccctccgaggcagagggatctccatagaacccctgggtttgccgtgcagggcgagctgggccacactggcctgaatcccaggcctgctctctgggctcagagtgtgagtgtctacccactctggcgaccccgctgtgcacagcggccctgagcagcccacaggaaggcactgcgcagtgacggccccactcaccttggcccaggccagcttctcccggatggcggcattgccgggctccacgtggcgtgcaaacttgaggttgttgatggtgtactcgtggccacagtagactc

SEQ ID NO: 4902 - DNA, 661 bp, Homo sapiens
  HAGH
  misc_feature [331]..[331]: Chromosome 16, SNP identification no. = rs344361
  misc_feature [331]..[331]: allele = c, in linkage disequilibrium with rs2575357, respectively
  misc_feature [331]..[331]: n is a, t, c or g
ctcgctgccctgagaagaatcctaaatctgaggtccccaactccatccctcccacaccggcaccacccaggctcatcccccagccctgcgcactgcagcctgaaggcaccttatccctcacagcgaggcgcccgtccctcccgccatgccctccgccctcctctggggctccctggccacaccttctccctgcacccctggtttgactccacccaggggtccgagtgtggccctgggtcactcccacctgggttcaaggctggggctgccacctcccaccaggaggcctcccagccgtacaaggcccacatcgagtcaccgggtgaaaccncgcactgtgaggccagtcgggacaaggccacagtaacaagcacgggaggcagcccccaccaccagcagcctccgcaccgccttagaaggccgcagccatgaagggcccggcctacagtgaggccgtcccccggccatatgacctccacaggtggctccacaggtctgcaaccaccctgggaggcaggcagggcccccagactagcacaggtccctgagtccacactacggcatcaaggaacacagccccagggctgagccacccctcgccctgctggaagaaactgactcctttcccgtgggacccgcccggaccccagctgtccagcag

SEQ ID NO: 4903 - DNA, 661 bp, Homo sapiens
  HAGH
  misc_feature [331]..[331]: Chromosome 16, SNP identification no. = rs2268671
  misc_feature [331]..[331]: allele = a, in linkage disequilibrium with rs2575357, respectively
  misc_feature [331]..[331]: n is a, t, c or g
gggctggcattgcctgctcaaggccgttgtttggcttttagaaatttttgaggctcttcaaagctagagagacttacttctttttgccaagcaagcgcccgagggcaaccggcacctttctcctgagccaggacccgtctggcactgccctagggcctctcagctgtggcttccccagcctctgtgttggggtgaaatgaagcctttggtcctctccttggtggtgggagcgctgtgctggtggcttggccaaggtttgatggaagcgtcatggttcacacgcagctggacttaggcctggagagtctcaggctctgtgagttgggccccncgagcctcttcggggtcatcagaggtgtccgtgcagggacctgggcttgaggggcggtgcctgcagcctccctggcccttgtcctgtgtggctgagctgctgtctctcagcacgttggcctgcctgtcgtgcgaggcccttgctgccaccatgcctcctcctggggaccctggtggtggcctctgtgtggctgcctggcacatcacagcttgctgcagctccctgcctctcccggcctcgccgcagacgtctctttctaacactgtggtgctttttagttccccggcccctctaacattcatgccgacacgtgaagtcctaagccaggcc

SEQ ID NO: 4904 - DNA, 661 bp, Homo sapiens
  HAGH
  misc_feature [331]..[331]: Chromosome 16, SNP identification no. = rs2268670
  misc_feature [331]..[331]: allele = c, in linkage disequilibrium with rs2575357, respectively
  misc_feature [331]..[331]: n is a, t, c or g
ccgtctcaaaaaaaacaaagacaagcagccatatctggagaggttgggtttttaaaaatccttgaaaatggatgaataaaatgccctgtctgggttctagggctggcattgcctgctcaaggccgttgtttggcttttagaaatttttgaggctcttcaaagctagagagacttacttctttttgccaagcaagcgcccgagggcaaccggcacctttctcctgagccaggacccgtctggcactgccctagggcctctcagctgtggcttccccagcctctgtgttggggtgaaatgaagcctttggtcctctccttggtggtgggagcnctgtgctggtggcttggccaaggtttgatggaagcgtcatggttcacacgcagctggacttaggcctggagagtctcaggctctgtgagttgggcccctcgagcctcttcggggtcatcagaggtgtccgtgcagggacctgggcttgaggggcggtgcctgcagcctccctggcccttgtcctgtgtggctgagctgctgtctctcagcacgttggcctgcctgtcgtgcgaggcccttgctgccaccatgcctcctcctggggaccctggtggtggcctctgtgtggctgcctggcacatcacagcttgctgcagctccctgcctctc

SEQ ID NO: 4905 - DNA, 661 bp, Homo sapiens
  HAGH
  misc_feature [331]..[331]: Chromosome 16, SNP identification no. = rs3743853
  misc_feature [331]..[331]: allele = g, in linkage disequilibrium with rs2575357, respectively
  misc_feature [331]..[331]: n is a, t, c or g
ccactttaaatgtcatactgaccagcccgtgtatgccagcctcgatctcatcgttttctttaaccggtccaactccctttggcgtcccagtcaagataatatctccttcttccaaggttatgatcttagaaacatagctgatgatgtaggggatggaaaaaatcatggaggatgtctcaccctcctgtctgagttcgccgttgaccttgagccagagcttcagcttgtgagggtcagggatcttctccttgggcacgaacgcgctgaccgggcaggacgccgtgaagctcttcgccagagtccagggcagccccttcttcttgcactcgtnctgcacgtcccgggcggtcatatccaggcacagggcatagccgcccacgtagtccatggccgcagcctcggggactgcgcggcagcgcttgcccatcaccacgcccagctccagctcgtggtgcaggttgcgagtgtacgcgggcatgaggatgggcgagccctcgggcgcgtaggccgtggacggcttcaggaacagcacgggctcgctcaacaccgcgctgcgcatctccctgacgtggtccgcgtagttcctccccacgcagacgatgttctttccccactcccagaagcgggacaatggcctggatgctgccatgattcccatcaa

SEQ ID NO: 4906 - DNA, 661 bp, Homo sapiens
  MGC35212
  misc_feature [331]..[331]: Chromosome 16, SNP identification no. = rs9652776
  misc_feature [331]..[331]: allele = c, in linkage disequilibrium with rs2575357, respectively
  misc_feature [331]..[331]: n is a, t, c or g
caggctggagtgcagtggtgagatctcggctcactgcaacctctgcctcccaggttcaagcaattctactgcctcagcctcctgagtagctgggatgacaggcacctgccaccatgcctggctaatttttgtagttttagcagagatggggtttcaccatcttggacaggctggtcatgaaccaattcccctttgaatccttcttctcccctatatcttactggtcccctcattaattaatgagttaaatcttcaacatgtgttatttttgtatgcatcatggtttttggattttggttttggattttacatctttttatttgtaaaatantgtgttacctaatgcacgaagcagcttgtccataattatgaatatttgttaaagccacctggaacatctgttacacacattctctgggaaagtgcagtatccacttgagggtcattcattgttgtatttgaatcaaatttagaaaactcttaagttcccatgaacttaagttgatcagactcattagcaagtggtgcctcctgtctggagggaaagtatacagggtcggtcaaggacctaagcatgccctgacttgcaaagagacagtatttaggggcccatgctaactgttgaagagatgcagcatcttactgcaactttactgccttt

SEQ ID NO: 4907 - DNA, 661 bp, Homo sapiens
  MGC35212
  misc_feature [331]..[331]: Chromosome 16, SNP identification no. = rs9652786
  misc_feature [331]..[331]: allele = t, in linkage disequilibrium with rs2575357, respectively
  misc_feature [331]..[331]: n is a, t, c or g
gattttggttttggattttacatctttttatttgtaaaatactgtgttacctaatgcacgaagcagcttgtccataattatgaatatttgttaaagccacctggaacatctgttacacacattctctgggaaagtgcagtatccacttgagggtcattcattgttgtatttgaatcaaatttagaaaactcttaagttcccatgaacttaagttgatcagactcattagcaagtggtgcctcctgtctggagggaaagtatacagggtcggtcaaggacctaagcatgccctgacttgcaaagagacagtatttaggggcccatgctaacngttgaagagatgcagcatcttactgcaactttactgcctttggcctggtagtgaagaggcctcaagccgaggtcctagaaatattgctaaggccactggagactccatgtctgcaaactattcagatgtgttggtggccatggaaaatgggaaaacctgcttatgaggctgagatggaggagatgcagcattcacaaatgctcctgcaggatgtccatgagatgaaaactaatttcataataacactaattctctcatcagcacgcaatgttttctagaggctccatgataccattagtctgacacaaatggaatgtgtgctctagaatg

SEQ ID NO: 4908 - DNA, 661 bp, Homo sapiens
  MGC35212
  misc_feature [331]..[331]: Chromosome 16, SNP identification no. = rs9652777
  misc_feature [331]..[331]: allele = c, in linkage disequilibrium with rs2575357, respectively
  misc_feature [331]..[331]: n is a, t, c or g
ttgttaaagccacctggaacatctgttacacacattctctgggaaagtgcagtatccacttgagggtcattcattgttgtatttgaatcaaatttagaaaactcttaagttcccatgaacttaagttgatcagactcattagcaagtggtgcctcctgtctggagggaaagtatacagggtcggtcaaggacctaagcatgccctgacttgcaaagagacagtatttaggggcccatgctaactgttgaagagatgcagcatcttactgcaactttactgcctttggcctggtagtgaagaggcctcaagccgaggtcctagaaatattgntaaggccactggagactccatgtctgcaaactattcagatgtgttggtggccatggaaaatgggaaaacctgcttatgaggctgagatggaggagatgcagcattcacaaatgctcctgcaggatgtccatgagatgaaaactaatttcataataacactaattctctcatcagcacgcaatgttttctagaggctccatgataccattagtctgacacaaatggaatgtgtgctctagaatgttttaaaattttttcagtattaagctgcagtacagcaagtatcagtagatataaccacacaaacgggagcacattaacttgcgggag

SEQ ID NO: 4909 - DNA, 661 bp, Homo sapiens
  MGC35212
  misc_feature [331]..[331]: Chromosome 16, SNP identification no. = rs12325141
  misc_feature [331]..[331]: allele = a, in linkage disequilibrium with rs2575357, respectively
  misc_feature [331]..[331]: n is a, t, c or g
caaactattcagatgtgttggtggccatggaaaatgggaaaacctgcttatgaggctgagatggaggagatgcagcattcacaaatgctcctgcaggatgtccatgagatgaaaactaatttcataataacactaattctctcatcagcacgcaatgttttctagaggctccatgataccattagtctgacacaaatggaatgtgtgctctagaatgttttaaaattttttcagtattaagctgcagtacagcaagtatcagtagatataaccacacaaacgggagcacattaacttgcgggagaatacaagagaaaagagttgagaaccntgaagtgaagcaactaggctggctgggtccagtctcacctgtgacccagtgcaagtggcaacacttcttggtcccacttttctcatctgcaataggggagtttgtctcactgcacttttcctcctctgacaccttgaacacaaagactcgaggatcctccaacactgaagtgcctcaggaggcaactgtggcccttcagggttggaggatcatggaattttgcaggttagcaaatttaattaacctctgcagggtctcacaggctgaggtgtggtgggattaggattcagaccaaatctgtctccccgcaacaacccaagcacttaattg

SEQ ID NO: 4910 - DNA, 661 bp, Homo sapiens
  MGC35212
  misc_feature [331]..[331]: Chromosome 16, SNP identification no. = rs12325218
  misc_feature [331]..[331]: allele = t, in linkage disequilibrium with rs2575357, respectively
  misc_feature [331]..[331]: n is a, t, c or g
tgttggtggccatggaaaatgggaaaacctgcttatgaggctgagatggaggagatgcagcattcacaaatgctcctgcaggatgtccatgagatgaaaactaatttcataataacactaattctctcatcagcacgcaatgttttctagaggctccatgataccattagtctgacacaaatggaatgtgtgctctagaatgttttaaaattttttcagtattaagctgcagtacagcaagtatcagtagatataaccacacaaacgggagcacattaacttgcgggagaatacaagagaaaagagttgagaaccatgaagtgaagcaacnaggctggctgggtccagtctcacctgtgacccagtgcaagtggcaacacttcttggtcccacttttctcatctgcaataggggagtttgtctcactgcacttttcctcctctgacaccttgaacacaaagactcgaggatcctccaacactgaagtgcctcaggaggcaactgtggcccttcagggttggaggatcatggaattttgcaggttagcaaatttaattaacctctgcagggtctcacaggctgaggtgtggtgggattaggattcagaccaaatctgtctccccgcaacaacccaagcacttaattgtgctatcttacactg

SEQ ID NO: 4911 - DNA, 661 bp, Homo sapiens
  MGC35212
  misc_feature [331]..[331]: Chromosome 16, SNP identification no. = rs11643835
  misc_feature [331]..[331]: allele = a, in linkage disequilibrium with rs2575357, respectively
  misc_feature [331]..[331]: n is a, t, c or g
gattaggattcagaccaaatctgtctccccgcaacaacccaagcacttaattgtgctatcttacactgcctcactaactgaagggaacaccacagggtgggtgggggtggggacaacctagtctgaccttttggggttcaggggccaagagaggggtctcactatgttgcccaggctggcctcaaactcctgggttcaggtgatcctcccacctcagcctaccaagtagctgggattacaggtgtgtactattgcacccatcagctctgattttaaagccctttcccctgttttggatttaaccttaaaggatattttctttgttggtctnttttctttgatgtctttggtaactcctttatacaatatgaaaaaacccctggctatttcctttgcttttaggatagctgaatccttatgcacatctgggaactgggcattagaaataataaattctcgaatttatctaggtttttcttatggtttgaatatacagaataataaatatatagaataatatgggactataaaatgcactaacttttaaataaattttgcttctttccaagagaaattgccactttaatgctgttttctgttcatctgtcattgcaagaaactcatgtacctggttaaaaaaaaaatatgagacaaatatatt

SEQ ID NO: 4912 - DNA, 661 bp, Homo sapiens
  MGC35212
  misc_feature [331]..[331]: Chromosome 16, SNP identification no. = rs3813760
  misc_feature [331]..[331]: allele = c, in linkage disequilibrium with rs2575357, respectively
  misc_feature [331]..[331]: n is a, t, c or g
ctgtgtgatcagtcagatcaatcagcacatggaaactgagaaagacagatttaaagtccaaggagtttttgttgcaagttgtgcacatgttagatgcttcatttacaatataaccacagctggaactgaaaagaaacaaagacaatgataaaatgtgatgccctaagctacaaatttcatctgtagcagaaaaagaattgtcactaaaaactctacgacagtgtgtggaaaacttactgagtgttcagtgctatgcggtctacaagacagtcgtaaaaaacagtaaaacacactttctacgcagccattctcaggagtcatctgaaactgngtacaccagtcctctgcctgccctccttccctccctctgccaagccctcgaggtccatcccagtctcatttccttgctggggccctcccttctcgtatcccagcctgcagcctttctctcttggaacagcagcagagtgcacgcctcaggactgactggtgctgttgcatcagctccttattctcacctccctggctgggagttctgagggcaggaactgtgtcttgtgcctggaaagcacgagttcaacagctgctcactggatgggcctgcacggggccttctctacaaatacagaaagccttgcaaggctggccgggtagcacccag

SEQ ID NO: 4913 - DNA, 661 bp, Homo sapiens
  MGC35212
  misc_feature [331]..[331]: Chromosome 16, SNP identification no. = rs3848346
  misc_feature [331]..[331]: allele = c, in linkage disequilibrium with rs2575357, respectively
  misc_feature [331]..[331]: n is a, t, c or g
tcatctgtagcagaaaaagaattgtcactaaaaactctacgacagtgtgtggaaaacttactgagtgttcagtgctatgcggtctacaagacagtcgtaaaaaacagtaaaacacactttctacgcagccattctcaggagtcatctgaaactgcgtacaccagtcctctgcctgccctccttccctccctctgccaagccctcgaggtccatcccagtctcatttccttgctggggccctcccttctcgtatcccagcctgcagcctttctctcttggaacagcagcagagtgcacgcctcaggactgactggtgctgttgcatcagctncttattctcacctccctggctgggagttctgagggcaggaactgtgtcttgtgcctggaaagcacgagttcaacagctgctcactggatgggcctgcacggggccttctctacaaatacagaaagccttgcaaggctggccgggtagcacccagatgctattaacactgctggtgatacactctcctctctttcagtgatttatgctattccatatttctgaagcaagccttactttagcaattttaaacagggaaactaattcaaatttctcaaataggggaaatgaactgaagatagtggtttcttatctagccacagatcacttggt

SEQ ID NO: 4914 - DNA, 661 bp, Homo sapiens
  MGC35212
  misc_feature [331]..[331]: Chromosome 16, SNP identification no. = rs3848348
  misc_feature [331]..[331]: allele = t, in linkage disequilibrium with rs2575357, respectively
  misc_feature [331]..[331]: n is a, t, c or g
ggccctcccttctcgtatcccagcctgcagcctttctctcttggaacagcagcagagtgcacgcctcaggactgactggtgctgttgcatcagctccttattctcacctccctggctgggagttctgagggcaggaactgtgtcttgtgcctggaaagcacgagttcaacagctgctcactggatgggcctgcacggggccttctctacaaatacagaaagccttgcaaggctggccgggtagcacccagatgctattaacactgctggtgatacactctcctctctttcagtgatttatgctattccatatttctgaagcaagccttacnttagcaattttaaacagggaaactaattcaaatttctcaaataggggaaatgaactgaagatagtggtttcttatctagccacagatcacttggtctagcaaattttagatgcttttcctcagatatcaataataaatgtacaggaaaaaaattagtttttcaatttttgaaaactatttttcaaaaaatgaatacaaggccttacacagcatcctccacattacttttttcaactttaataccacatcataaaatgttttaaaaattcagaggtcaatatcttgactgtggcaatagatacacaaacttacaagtgtgataaaactaat

SEQ ID NO: 4915 - DNA, 661 bp, Homo sapiens
  MGC35212
  misc_feature [331]..[331]: Chromosome 16, SNP identification no. = rs9806787
  misc_feature [331]..[331]: allele = c, in linkage disequilibrium with rs2575357, respectively
  misc_feature [331]..[331]: n is a, t, c or g
cagccaggcgcagtggctcacgcctgtaatcctagcactttgggaagccgaggcaggtggatcacgaggtcaggagatcgcgaccatcctggctaacatggtgaaaccctgtctctactaaaaatacaaagaattagccgggcgtggggtgggcgcctgtcgtcccacctactccagaggctgaggcaggagaatggcgtgaacccgggaggcggagcttgcagtgagccgagatcgcgccactgcactccaacccgggcgacagagcgagactccatctcaaaaaataaaataaaaaaaaataataaataaataaagtacatcacaaaanaaaagttatcaaaatggccaatacacgtactgggcctcaataatcatcaggaaaatacaaattaaacaagagtaggccggatgtggtggctcatgcctgtaattctaacactttgagaggttgagactggtcgatcgcttgaggtcaggggtttgagaccagcctggccaacatagcaaaaccctgtctctactaaaaataaaaaattagctgggtgtagcagtgtgtgcccgtaatcccagctacttgggaggctaaggaaggagaatcgcttgaacccaggaggtggaggttgcactcaaccgagatcgcggctttgcatcccagcct

SEQ ID NO: 4916 - DNA, 661 bp, Homo sapiens
  MGC35212
  misc_feature [331]..[331]: Chromosome 16, SNP identification no. = rs11248898
  misc_feature [331]..[331]: allele = g, in linkage disequilibrium with rs2575357, respectively
  misc_feature [331]..[331]: n is a, t, c or g
cgcttgaggtcaggggtttgagaccagcctggccaacatagcaaaaccctgtctctactaaaaataaaaaattagctgggtgtagcagtgtgtgcccgtaatcccagctacttgggaggctaaggaaggagaatcgcttgaacccaggaggtggaggttgcactcaaccgagatcgcggctttgcatcccagcctgggtgacagagccagactccatctcaaaaaaaaaaaaaaagagaattccactaaacacctaacatttaaaagagtaataacacaacattagtgaggatgtgaagcaacaacaaaaataaactttacaaaactaaanacaataacctattattcatttttatttttctttatcttagaagaatcttccaggaactaatattacttgggttagaaaacttttatgagaacttatccggttccttcagcacttcattggtttcttttcttttgttgatgtctagtgcatgaaatttaattttcttcaataaaaagatggtgatgtgtatctatttatctataatatttttatgtctttatccttctattagtatatatgcacaaaaagatagattaaaagatgttaaccaaataactatttggggctctttgttgcattctgtattatgtttctttttttttttttttt

SEQ ID NO: 4917 - DNA, 661 bp, Homo sapiens
  MGC35212
  misc_feature [331]..[331]: Chromosome 16, SNP identification no. = rs9806945
  misc_feature [331]..[331]: allele = a, in linkage disequilibrium with rs2575357, respectively
  misc_feature [331]..[331]: n is a, t, c or g
ttttgtgtttttagtagagacggcgttttgccatgttggccaggctggtctcatgaactcctgggctcaaaagaaaaagaaaaagatgcccactattttaagctacctttagaaagtagaaatatagtagttacagaataggaatctggtatcttttaccatgtcaaacaaacctttacaggcccaatttcggcctttaaaaaaatccaaatatatttaaacggtcacttacaatttatggattctttgaaataactgtcaatttcatcatccagaacattcgtttctttattttctcgtataaaattcagcagaatgttagcttctggtntatcttaaattgaaaatgcataataagtaaaaagcaaactgattatcatttaaatcacatttaaatcatccaaaatcattttaatagtaaaaagtgaagacatgtaagaatacaatcaaatagaatattacgtggccattaacaatgtgatgtagaattctgtaaacatagagagatgtacaccacattacatctaaaacagatgttagtgaaaagagcagcttactaacctatgtggttcaatacccttttaattaaaaaatctacatatataagggaccgggcgcagtggctcacgcctgtaatcccagcactttgggaggctgaagc

SEQ ID NO: 4918 - DNA, 661 bp, Homo sapiens
  MGC35212
  misc_feature [331]..[331]: Chromosome 16, SNP identification no. = rs11640407
  misc_feature [331]..[331]: allele = a, in linkage disequilibrium with rs2575357, respectively
  misc_feature [331]..[331]: n is a, t, c or g
agaaaaagctatttttgggccgggcgctgtggctcacgcctgtaatcccagaactgtgggaggctgaggcaggtggatcacctgaggtcaggagttcaagaccaggctggccaacattgtgaaaccccgtctctactaaaaatgtaaaaattagccatgtgtggtggtgcgcgcctgtaatcccagctacttggggggctgagacaggagaattgcttgaaccctggaggcggaggttgcagtgagctgagcacatgccactgcactccagcctaggtgacacagcaagactccatctcaaaaaacaaacaaacaaaaaaagcctattttngggccaagcaaggtggctcacacctgtaatccttcaggaggctgaggcaggaggatttcttgaggtcaggagtttgagaccccccaaaaaaaagaagaaaagagaagaggggaggggaggggaggggagaaagaaaaaacagagaaagaaagagagagaaagaaggaactactttgtgattactttaatatgacctactgatcagaaaacaaagttcccatataaatcgggctgcccttgagtagcctaaaaacggctgtagacactatcattcctgtccccgttttagggttgtgtggcagggcagggactgaaatacactctatcaag

SEQ ID NO: 4919 - DNA, 661 bp, Homo sapiens
  MGC35212
  misc_feature [331]..[331]: Chromosome 16, SNP identification no. = rs11642885
  misc_feature [331]..[331]: allele = t, in linkage disequilibrium with rs2575357, respectively
  misc_feature [331]..[331]: n is a, t, c or g
tcaagcggtcctcctatctcagcctcctgagtagctgagatcacaggcacgcgccaccatgcccagctatttttttttaattttttgtagagatggagtctcacttatggcttgtcccttcttgtaggcaaaaagatgataaattttgatccagtagtatctttttctatcagtgactgctactgatattaaacacattaaatatcctccacaaaagcaatagcaaaattcctcttccacacaatgtaatgtggcttgcagaatacattatttcatgctaaattccattgttactctcttcatctcttcaggtgaattaagcatcatctangataactaggtaactcatctcctagaactatgttacagaacatgccttcagggagtgatctaaaacttccctcttttcctcctggtccctcccgcatgtctggcataagccagcaatagcaataaggagaatcctatcatcttatcccttctcctttttttttttttcctttttttttttttttggagacagagtctcactctgttgcccaggctgggatgcagtggcatgatctcgactcactacaacatccacctccccggctgaagcgatcctcctgccttagcctccctagtagctgggactataggcaccataccaccacgcccg

SEQ ID NO: 4920 - DNA, 661 bp, Homo sapiens
  MGC35212
  misc_feature [331]..[331]: Chromosome 16, SNP identification no. = rs2492886
  misc_feature [331]..[331]: allele = t, in linkage disequilibrium with rs2575357, respectively
  misc_feature [331]..[331]: n is a, t, c or g
aaacctgcatgttcggcacatgtatgccagaacttaaagtaaaactaaaaaaaaaagtaaagctgatataaacaagcacacaaattcgtgcattctcgcgagtattctcctttaaatctgtttccttgacagaataaatccaagaaatctagatctgctgtacaacgtagtagctatgatcagtaacaacgtatgacattcttgaaaagtactgagaacagattttacgtgttctcaccacaaaaaaaatgataagtatgtgaagtagcacatatgttaattagcttgatttagccattctgtaatgtatacatatttcaaaacaacatantgtataaaatgtattcaattttttgtcaattaaaaagttaagcaataaataataaattttaaaaatgtgtctccttgagaaagatggcattttttctaatgatgttggttattgctcaaaatactttgacatttttttctttgaatctgtcatcagagccaaatgcacaacatcctataatatctgtctcattaatgagatcttgagttttttataccattgtacagtcaagcttgatcatcttttccatcagacaaatctgtcttttagaaacttttccagctcaaatttgcccttagaggatgaagattttactatcactggtattac

SEQ ID NO: 4921 - DNA, 661 bp, Homo sapiens
  MGC35212
  misc_feature [331]..[331]: Chromosome 16, SNP identification no. = rs2575359
  misc_feature [331]..[331]: allele = a, in linkage disequilibrium with rs2575357, respectively
  misc_feature [331]..[331]: n is a, t, c or g
tcgtgcattctcgcgagtattctcctttaaatctgtttccttgacagaataaatccaagaaatctagatctgctgtacaacgtagtagctatgatcagtaacaacgtatgacattcttgaaaagtactgagaacagattttacgtgttctcaccacaaaaaaaatgataagtatgtgaagtagcacatatgttaattagcttgatttagccattctgtaatgtatacatatttcaaaacaacatagtgtataaaatgtattcaattttttgtcaattaaaaagttaagcaataaataataaattttaaaaatgtgtctccttgagaaaganggcattttttctaatgatgttggttattgctcaaaatactttgacatttttttctttgaatctgtcatcagagccaaatgcacaacatcctataatatctgtctcattaatgagatcttgagttttttataccattgtacagtcaagcttgatcatcttttccatcagacaaatctgtcttttagaaacttttccagctcaaatttgcccttagaggatgaagattttactatcactggtattactaaatgtaaaaataacaggccgggcgtggtggctcatgcctgtaatcccagcactttgggaggccgaggcgggcggatcactgga

SEQ ID NO: 4922 - DNA, 661 bp, Homo sapiens
  MGC35212
  misc_feature [331]..[331]: Chromosome 16, SNP identification no. = rs1657116
  misc_feature [331]..[331]: allele = a, in linkage disequilibrium with rs2575357, respectively
  misc_feature [331]..[331]: n is a, t, c or g
gcagaagccagtgcactctaacagcctccgaggccttcttcctgggtgccccatctcttctcagaacagctcctgctggccttgaactcctgggctccagccacaccagcccctgggtgttcctcccacacataggcacagggctttcccttggttatccctttagcctcctcatcaagtctttgctcaaacgtcactctcccatgcagcgtgcccgaccaccttgtggctctctaggtcctcctgactctgttccacctgttctccttaaatatttcataattcacggacatattatcttcattatttattctctgtctctccctgctgnagggtaaactccatgagggtggaaatatttatccattttgtcgttgcaccccagaacagcacccagcatacagcacatgctcagtaaattagttcagtgaagagcaattcggggcatgcacatctcctcccatggtgctgccttcaaggagacaacatccatgtgttggatgtgcaagattcagagtactcatataaaaaccagagtctcagtattttacaccattcctcatagtaattctatcttttaaaaatgctgataatggtttggtcaaaagcacacattgctttataattctgtcactgctgatgctttgttacagaccagcag

SEQ ID NO: 4923 - DNA, 661 bp, Homo sapiens
  MGC35212
  misc_feature [331]..[331]: Chromosome 16, SNP identification no. = rs1742419
  misc_feature [331]..[331]: allele = t, in linkage disequilibrium with rs2575357, respectively
  misc_feature [331]..[331]: n is a, t, c or g
agggtaaactccatgagggtggaaatatttatccattttgtcgttgcaccccagaacagcacccagcatacagcacatgctcagtaaattagttcagtgaagagcaattcggggcatgcacatctcctcccatggtgctgccttcaaggagacaacatccatgtgttggatgtgcaagattcagagtactcatataaaaaccagagtctcagtattttacaccattcctcatagtaattctatcttttaaaaatgctgataatggtttggtcaaaagcacacattgctttataattctgtcactgctgatgctttgttacagaccagcagngtgagcgtatgttttaaatgatacactacatactgtactcatagcttcatgagatggcaaaggattgattactccatttctttagcagtactggcttgacggttatgtctgcactataaagcaccctgggaatgctcacaggcactaatccctcatctccccaatctggcttccttgatttcatgctgtaataaactgtaactccttcaacaaccactccaggggatcatctgggcatttaatgtgcagttatgagctaatgatactacacagagagtactgtgtgcacgcatgcatgtgttatcaatgtcctagcagtaaaagttattt

SEQ ID NO: 4924 - DNA, 661 bp, Homo sapiens
  MGC35212
  misc_feature [331]..[331]: Chromosome 16, SNP identification no. = rs1625279
  misc_feature [331]..[331]: allele = a, in linkage disequilibrium with rs2575357, respectively
  misc_feature [331]..[331]: n is a, t, c or g
ttttgtcgttgcaccccagaacagcacccagcatacagcacatgctcagtaaattagttcagtgaagagcaattcggggcatgcacatctcctcccatggtgctgccttcaaggagacaacatccatgtgttggatgtgcaagattcagagtactcatataaaaaccagagtctcagtattttacaccattcctcatagtaattctatcttttaaaaatgctgataatggtttggtcaaaagcacacattgctttataattctgtcactgctgatgctttgttacagaccagcagcgtgagcgtatgttttaaatgatacactacatactntactcatagcttcatgagatggcaaaggattgattactccatttctttagcagtactggcttgacggttatgtctgcactataaagcaccctgggaatgctcacaggcactaatccctcatctccccaatctggcttccttgatttcatgctgtaataaactgtaactccttcaacaaccactccaggggatcatctgggcatttaatgtgcagttatgagctaatgatactacacagagagtactgtgtgcacgcatgcatgtgttatcaatgtcctagcagtaaaagttatttgaatgtagcaaaactgaatttacctattagtcaat

SEQ ID NO: 4925 - DNA, 661 bp, Homo sapiens
  MGC35212
  misc_feature [331]..[331]: Chromosome 16, SNP identification no. = rs1625393
  misc_feature [331]..[331]: allele = g, in linkage disequilibrium with rs2575357, respectively
  misc_feature [331]..[331]: n is a, t, c or g
taaattagttcagtgaagagcaattcggggcatgcacatctcctcccatggtgctgccttcaaggagacaacatccatgtgttggatgtgcaagattcagagtactcatataaaaaccagagtctcagtattttacaccattcctcatagtaattctatcttttaaaaatgctgataatggtttggtcaaaagcacacattgctttataattctgtcactgctgatgctttgttacagaccagcagcgtgagcgtatgttttaaatgatacactacatactgtactcatagcttcatgagatggcaaaggattgattactccatttctttngcagtactggcttgacggttatgtctgcactataaagcaccctgggaatgctcacaggcactaatccctcatctccccaatctggcttccttgatttcatgctgtaataaactgtaactccttcaacaaccactccaggggatcatctgggcatttaatgtgcagttatgagctaatgatactacacagagagtactgtgtgcacgcatgcatgtgttatcaatgtcctagcagtaaaagttatttgaatgtagcaaaactgaatttacctattagtcaataatttagcatccaagcaataaaatcgatctctcaaaaattatcacaatg

SEQ ID NO: 4926 - DNA, 661 bp, Homo sapiens
  MGC35212
  misc_feature [331]..[331]: Chromosome 16, SNP identification no. = rs1617255
  misc_feature [331]..[331]: allele = c, in linkage disequilibrium with rs2575357, respectively
  misc_feature [331]..[331]: n is a, t, c or g
ccttgttttttttttaagacggggtcttgctcttgtggcctaggctggagtacaatggcgcgatttcagctcactgcaatttctgcctcctgggttcaagtgattctcctgcctcagtctcccgagtagctgggattacaggcgcccaccaccaagcccagctaatttttatatttttagtagagactgggtttcaccatgttggccagtctggtcttgaactcctgacctcaggtgatccacctgccttggcctcccaaagtgctgggattacaggcatgagccaccacgtccgacctcacatttctttagtaaagatatcaaagttcantgtaagtttttaaaaaagttatataaagcaatttttacttctaatttgaattaaatccaggctgaattttcattcttaaatatactgtataaatattgaaatgtgttcagtcatttccaaagggataaaaggtttcacaaagttttttacctggattagttgtaataatggtttttgagattacagttgctgtcatgcagttccgaaatttgtcaaaatttattcttacatctgaggcaaatattactgtttgggaaaaaagccatttaaaattattacatgggaggatataaatgacaaatattggacacaatcattgaatgataatac

SEQ ID NO: 4927 - DNA, 661 bp, Homo sapiens
  MGC35212
  misc_feature [331]..[331]: Chromosome 16, SNP identification no. = rs1657117
  misc_feature [331]..[331]: allele = c, in linkage disequilibrium with rs2575357, respectively
  misc_feature [331]..[331]: n is a, t, c or g
actgatagtgacatattatttacaacaataaaagaaagcttcagtggctggggtcagccatccccaaggtggtcaaagacctcctagtcttaagcatgccagcttcctcctagggagaatttaacaactccatgagagaacattccttcaacacacactctcctctagtaatactctgctctgccaattcttaatttatttttccaacacttaatcactccaggctagttagaactaaagcctgaagactttaaactcacactttcagaccatgaaggtgagtgtcccccagtggataaactgctcaggggccttgatgggttgaagacanttttgaaatcagttcctttggtacccaggcatcagaggtctagacaatgccttgttgtacctggcagtgcttcagggtgcagtccccaccctggcccacgtgcccctgtgtcctgccctgctccaggatacttcccaggaagcacagagggaaactctggcttgttccatgggacctaataaaacatcatttgttacacgacagaattcaataataaaactgggcacggtggagtccccctaagcaattccatgccatctaaagacctcattttaaggtggtatccataacaactcaacattcaagagtgagatttattttttaaaatat

SEQ ID NO: 4928 - DNA, 661 bp, Homo sapiens
  MGC35212
  misc_feature [331]..[331]: Chromosome 16, SNP identification no. = rs1742421
  misc_feature [331]..[331]: allele = g, in linkage disequilibrium with rs2575357, respectively
  misc_feature [331]..[331]: n is a, t, c or g
gtcccccagtggataaactgctcaggggccttgatgggttgaagacatttttgaaatcagttcctttggtacccaggcatcagaggtctagacaatgccttgttgtacctggcagtgcttcagggtgcagtccccaccctggcccacgtgcccctgtgtcctgccctgctccaggatacttcccaggaagcacagagggaaactctggcttgttccatgggacctaataaaacatcatttgttacacgacagaattcaataataaaactgggcacggtggagtccccctaagcaattccatgccatctaaagacctcattttaaggtggtntccataacaactcaacattcaagagtgagatttattttttaaaatatcattcatctcctatcattatcctctcttgatatgaagtccatcatatttttgataaaatgaaaatgtcctggtgataactacagggatttcacagtttggaacagacatcggtgtttaccatgtcatcgcaaaagacgactctgtttcatcatagagtctaacttcacacctctggccttttctccggtctgaagttgtaaagtattttggctctccaaccttagaaatggaaataaatcattactcttcacctatatgtagaagttcttaagtatttgttga

SEQ ID NO: 4929 - DNA, 661 bp, Homo sapiens
  MGC35212
  misc_feature [331]..[331]: Chromosome 16, SNP identification no. = rs1742422
  misc_feature [331]..[331]: allele = g, in linkage disequilibrium with rs2575357, respectively
  misc_feature [331]..[331]: n is a, t, c or g
cccagtggataaactgctcaggggccttgatgggttgaagacatttttgaaatcagttcctttggtacccaggcatcagaggtctagacaatgccttgttgtacctggcagtgcttcagggtgcagtccccaccctggcccacgtgcccctgtgtcctgccctgctccaggatacttcccaggaagcacagagggaaactctggcttgttccatgggacctaataaaacatcatttgttacacgacagaattcaataataaaactgggcacggtggagtccccctaagcaattccatgccatctaaagacctcattttaaggtggtatccntaacaactcaacattcaagagtgagatttattttttaaaatatcattcatctcctatcattatcctctcttgatatgaagtccatcatatttttgataaaatgaaaatgtcctggtgataactacagggatttcacagtttggaacagacatcggtgtttaccatgtcatcgcaaaagacgactctgtttcatcatagagtctaacttcacacctctggccttttctccggtctgaagttgtaaagtattttggctctccaaccttagaaatggaaataaatcattactcttcacctatatgtagaagttcttaagtatttgttgatgaa

SEQ ID NO: 4930 - DNA, 661 bp, Homo sapiens
  MGC35212
  misc_feature [331]..[331]: Chromosome 16, SNP identification no. = rs1742423
  misc_feature [331]..[331]: allele = c, in linkage disequilibrium with rs2575357, respectively
  misc_feature [331]..[331]: n is a, t, c or g
ctatcattatcctctcttgatatgaagtccatcatatttttgataaaatgaaaatgtcctggtgataactacagggatttcacagtttggaacagacatcggtgtttaccatgtcatcgcaaaagacgactctgtttcatcatagagtctaacttcacacctctggccttttctccggtctgaagttgtaaagtattttggctctccaaccttagaaatggaaataaatcattactcttcacctatatgtagaagttcttaagtatttgttgatgaaaatactcaaatgttcaccttttaaacaccaaattagaaatattaaactagcaanaaccagtaatatatagttgattattttaaagcatctatctctaaactacatgtacgtagctgaagttgtaagtcacacaacactttgaagagacacagggagacaggtgcttgaagtagagactgaaagtctttttaacatgtcacaacaaagctccatgacaggcccctctggggcatctacgtggactcctcgagggcagggactgtgtttccagcacctttgtatccccatggctcagcgtggaactcatgtgactgaatgaactcaggctctctggggctcagcacctccgtcttcttagtgaacatcaaatacagcatatctgtg

SEQ ID NO: 4931 - DNA, 661 bp, Homo sapiens
  MGC35212
  misc_feature [331]..[331]: Chromosome 16, SNP identification no. = rs11643972
  misc_feature [331]..[331]: allele = g, in linkage disequilibrium with rs2575357, respectively
  misc_feature [331]..[331]: n is a, t, c or g
ataaatcattactcttcacctatatgtagaagttcttaagtatttgttgatgaaaatactcaaatgttcaccttttaaacaccaaattagaaatattaaactagcaagaaccagtaatatatagttgattattttaaagcatctatctctaaactacatgtacgtagctgaagttgtaagtcacacaacactttgaagagacacagggagacaggtgcttgaagtagagactgaaagtctttttaacatgtcacaacaaagctccatgacaggcccctctggggcatctacgtggactcctcgagggcagggactgtgtttccagcacctntgtatccccatggctcagcgtggaactcatgtgactgaatgaactcaggctctctggggctcagcacctccgtcttcttagtgaacatcaaatacagcatatctgtggtataaaaagtgtccacaggaaacaaacaaatataggatatgtcctttgccttctccacagggctaccatggtgagagccacatgcgagatacacaggaaactttgacactgtccaattctgtccattgtggggtaagatgatcaaagaagtggaaatcctcttgcccattaaagcaagttaaaaaaaaaaaaaaagaagagttgaaactaggacccttctct

SEQ ID NO: 4932 - DNA, 661 bp, Homo sapiens
  MGC35212
  misc_feature [331]..[331]: Chromosome 16, SNP identification no. = rs11643973
  misc_feature [331]..[331]: allele = c, in linkage disequilibrium with rs2575357, respectively
  misc_feature [331]..[331]: n is a, t, c or g
ctcttcacctatatgtagaagttcttaagtatttgttgatgaaaatactcaaatgttcaccttttaaacaccaaattagaaatattaaactagcaagaaccagtaatatatagttgattattttaaagcatctatctctaaactacatgtacgtagctgaagttgtaagtcacacaacactttgaagagacacagggagacaggtgcttgaagtagagactgaaagtctttttaacatgtcacaacaaagctccatgacaggcccctctggggcatctacgtggactcctcgagggcagggactgtgtttccagcacctttgtatccccanggctcagcgtggaactcatgtgactgaatgaactcaggctctctggggctcagcacctccgtcttcttagtgaacatcaaatacagcatatctgtggtataaaaagtgtccacaggaaacaaacaaatataggatatgtcctttgccttctccacagggctaccatggtgagagccacatgcgagatacacaggaaactttgacactgtccaattctgtccattgtggggtaagatgatcaaagaagtggaaatcctcttgcccattaaagcaagttaaaaaaaaaaaaaaagaagagttgaaactaggacccttctctccacccagtgg

SEQ ID NO: 4933 - DNA, 661 bp, Homo sapiens
  MGC35212
  misc_feature [331]..[331]: Chromosome 16, SNP identification no. = rs7199384
  misc_feature [331]..[331]: allele = g, in linkage disequilibrium with rs2575357, respectively
  misc_feature [331]..[331]: n is a, t, c or g
tttgttgatgaaaatactcaaatgttcaccttttaaacaccaaattagaaatattaaactagcaagaaccagtaatatatagttgattattttaaagcatctatctctaaactacatgtacgtagctgaagttgtaagtcacacaacactttgaagagacacagggagacaggtgcttgaagtagagactgaaagtctttttaacatgtcacaacaaagctccatgacaggcccctctggggcatctacgtggactcctcgagggcagggactgtgtttccagcacctttgtatccccatggctcagcgtggaactcatgtgactgaatgnactcaggctctctggggctcagcacctccgtcttcttagtgaacatcaaatacagcatatctgtggtataaaaagtgtccacaggaaacaaacaaatataggatatgtcctttgccttctccacagggctaccatggtgagagccacatgcgagatacacaggaaactttgacactgtccaattctgtccattgtggggtaagatgatcaaagaagtggaaatcctcttgcccattaaagcaagttaaaaaaaaaaaaaaagaagagttgaaactaggacccttctctccacccagtggcttctcatgtgggaacggcaggcacctctga

SEQ ID NO: 4934 - DNA, 661 bp, Homo sapiens
  MGC35212
  misc_feature [331]..[331]: Chromosome 16, SNP identification no. = rs1657118
  misc_feature [331]..[331]: allele = t, in linkage disequilibrium with rs2575357, respectively
  misc_feature [331]..[331]: n is a, t, c or g
ttaaactagcaagaaccagtaatatatagttgattattttaaagcatctatctctaaactacatgtacgtagctgaagttgtaagtcacacaacactttgaagagacacagggagacaggtgcttgaagtagagactgaaagtctttttaacatgtcacaacaaagctccatgacaggcccctctggggcatctacgtggactcctcgagggcagggactgtgtttccagcacctttgtatccccatggctcagcgtggaactcatgtgactgaatgaactcaggctctctggggctcagcacctccgtcttcttagtgaacatcaaatanagcatatctgtggtataaaaagtgtccacaggaaacaaacaaatataggatatgtcctttgccttctccacagggctaccatggtgagagccacatgcgagatacacaggaaactttgacactgtccaattctgtccattgtggggtaagatgatcaaagaagtggaaatcctcttgcccattaaagcaagttaaaaaaaaaaaaaaagaagagttgaaactaggacccttctctccacccagtggcttctcatgtgggaacggcaggcacctctgagagatgcacagcagcaggcccagcatggacagtcactggccacccccacctct

SEQ ID NO: 4935 - DNA, 661 bp, Homo sapiens
  MGC35212
  misc_feature [331]..[331]: Chromosome 16, SNP identification no. = rs1742426
  misc_feature [331]..[331]: allele = g, in linkage disequilibrium with rs2575357, respectively
  misc_feature [331]..[331]: n is a, t, c or g
tgacaggcccctctggggcatctacgtggactcctcgagggcagggactgtgtttccagcacctttgtatccccatggctcagcgtggaactcatgtgactgaatgaactcaggctctctggggctcagcacctccgtcttcttagtgaacatcaaatacagcatatctgtggtataaaaagtgtccacaggaaacaaacaaatataggatatgtcctttgccttctccacagggctaccatggtgagagccacatgcgagatacacaggaaactttgacactgtccaattctgtccattgtggggtaagatgatcaaagaagtggaaatnctcttgcccattaaagcaagttaaaaaaaaaaaaaaagaagagttgaaactaggacccttctctccacccagtggcttctcatgtgggaacggcaggcacctctgagagatgcacagcagcaggcccagcatggacagtcactggccacccccacctctgccaccactgcatctgtggtgcccagagaaagggacctagaaaggacagccagaggctgagaggtcagcctaacatctggggttgggaaggtggagaacactgtattaaaaaggagttttaaagtgaaacgccagtgggggtgagaggaagaaacaacaggttaaatgaaa

SEQ ID NO: 4936 - DNA, 661 bp, Homo sapiens
  MGC35212
  misc_feature [331]..[331]: Chromosome 16, SNP identification no. = rs1742428
  misc_feature [331]..[331]: allele = g, in linkage disequilibrium with rs2575357, respectively
  misc_feature [331]..[331]: n is a, t, c or g
aacatcaaatacagcatatctgtggtataaaaagtgtccacaggaaacaaacaaatataggatatgtcctttgccttctccacagggctaccatggtgagagccacatgcgagatacacaggaaactttgacactgtccaattctgtccattgtggggtaagatgatcaaagaagtggaaatcctcttgcccattaaagcaagttaaaaaaaaaaaaaaagaagagttgaaactaggacccttctctccacccagtggcttctcatgtgggaacggcaggcacctctgagagatgcacagcagcaggcccagcatggacagtcactggccncccccacctctgccaccactgcatctgtggtgcccagagaaagggacctagaaaggacagccagaggctgagaggtcagcctaacatctggggttgggaaggtggagaacactgtattaaaaaggagttttaaagtgaaacgccagtgggggtgagaggaagaaacaacaggttaaatgaaagtgtgaagagtggccgggaggggtggctcacgcctgtaatcccagcactttgggaggccgaggtgggtgaatcacgaggtcaggagttcaagactagcctggccaatatggtgaaaccttgtctctactaaaaatacaaaaattagct

SEQ ID NO: 4937 - DNA, 661 bp, Homo sapiens
  MGC35212
  misc_feature [331]..[331]: Chromosome 16, SNP identification no. = rs1742429
  misc_feature [331]..[331]: allele = t, in linkage disequilibrium with rs2575357, respectively
  misc_feature [331]..[331]: n is a, t, c or g
caaacaaatataggatatgtcctttgccttctccacagggctaccatggtgagagccacatgcgagatacacaggaaactttgacactgtccaattctgtccattgtggggtaagatgatcaaagaagtggaaatcctcttgcccattaaagcaagttaaaaaaaaaaaaaaagaagagttgaaactaggacccttctctccacccagtggcttctcatgtgggaacggcaggcacctctgagagatgcacagcagcaggcccagcatggacagtcactggccacccccacctctgccaccactgcatctgtggtgcccagagaaaggganctagaaaggacagccagaggctgagaggtcagcctaacatctggggttgggaaggtggagaacactgtattaaaaaggagttttaaagtgaaacgccagtgggggtgagaggaagaaacaacaggttaaatgaaagtgtgaagagtggccgggaggggtggctcacgcctgtaatcccagcactttgggaggccgaggtgggtgaatcacgaggtcaggagttcaagactagcctggccaatatggtgaaaccttgtctctactaaaaatacaaaaattagctgggcatggtggtacacgcctgtagtcctggctactcgggaggctgag

SEQ ID NO: 4938 - DNA, 661 bp, Homo sapiens
  MGC35212
  misc_feature [331]..[331]: Chromosome 16, SNP identification no. = rs2754186
  misc_feature [331]..[331]: allele = a, in linkage disequilibrium with rs2575357, respectively
  misc_feature [331]..[331]: n is a, t, c or g
ccatctcaaaaagaaaaaaaaagtatgaagaaaagaaaatgtaagagggctgaaagccaaaggggagatgaaaggcatgagaagaagtgacgtgacacatgaaaggttccagactcactgagggggtgggaaagctgccgcagtttcctgcttatactactatattcattcagggttgtagacaattcttacttcattataaacgtaatagcactgtctagaatttggggaaatcgcaaacaattgagcactcctttgaacaactgaataggattgaacataaactgcctacaaagtgacttctcctgtttttcaagatgatcatatagcnggcttattccttctccctaaagtatacagatgctccccaggtggcaggcatgtcctccacagccagggccctgccatctgaaagggtcacgttctctcagtcaccatttaatataacaagcaattcacatttacttacatgaactatcataagcatgtgtgttttttcctttttttttttttttgtctcttgactatcatccctctctatattaagaaattactcttgcctctttatttatttatttatcaacccagaatctcgctctgtcgcccaggctggagtgcagtggcgccatctcagctcattgcaacctctgtctcctgggtt

SEQ ID NO: 4939 - DNA, 661 bp, Homo sapiens
  MGC35212
  misc_feature [331]..[331]: Chromosome 16, SNP identification no. = rs1742431
  misc_feature [331]..[331]: allele = c, in linkage disequilibrium with rs2575357, respectively
  misc_feature [331]..[331]: n is a, t, c or g
gactcactgagggggtgggaaagctgccgcagtttcctgcttatactactatattcattcagggttgtagacaattcttacttcattataaacgtaatagcactgtctagaatttggggaaatcgcaaacaattgagcactcctttgaacaactgaataggattgaacataaactgcctacaaagtgacttctcctgtttttcaagatgatcatatagcgggcttattccttctccctaaagtatacagatgctccccaggtggcaggcatgtcctccacagccagggccctgccatctgaaagggtcacgttctctcagtcaccatttantataacaagcaattcacatttacttacatgaactatcataagcatgtgtgttttttcctttttttttttttttgtctcttgactatcatccctctctatattaagaaattactcttgcctctttatttatttatttatcaacccagaatctcgctctgtcgcccaggctggagtgcagtggcgccatctcagctcattgcaacctctgtctcctgggttcaagtaattctcctgcctcagcctcctgagtagctgggactccaggtacctgccaccatgcccagctaattttttttttttgagacggagtctcgttctgtcgcccagact

SEQ ID NO: 4940 - DNA, 661 bp, Homo sapiens
  MGC35212
  misc_feature [331]..[331]: Chromosome 16, SNP identification no. = rs1657120
  misc_feature [331]..[331]: allele = t, in linkage disequilibrium with rs2575357, respectively
  misc_feature [331]..[331]: n is a, t, c or g
cagctgagattacaggtacacaccaccacatccggctaatttttgtattttttgtagagatggagtttcaccatgttgccccaggctggtcttgaactgggctcaagtgatccctctgccttggtctcccaaagtgctaggatcacaggtgtaagccactgtgcctggactaattttcatgtactttattttgtgaaactttaccgttgaggtctacatctcaatctccgccttgtggctctggtctgtccaactacagagctcagaacttgctacagtaattcagacagacgctgatgcaccagaagggaacacccccctggtgccccanggagggccatcctcccgtgcacctcaccagcatggtcccactgcacctattagaccatggagccctacagcagggcagcgtgtattcccactccctccctggttgctgggcagctctgagcacaaaggcacagaactgatcccttaacttattcaactacgccccttcaaggaaggtcatggagattttcgagtcaataagcttaccctttccatttacatctttgtttaagcaatgtataaaaagttctcctatagttagcagatcatttacgagcagagtggaacactgcatttagcattcaaatacaattttattttactactcatc

SEQ ID NO: 4941 - DNA, 661 bp, Homo sapiens
  MGC35212
  misc_feature [331]..[331]: Chromosome 16, SNP identification no. = rs1742432
  misc_feature [331]..[331]: allele = t, in linkage disequilibrium with rs2575357, respectively
  misc_feature [331]..[331]: n is a, t, c or g
cccaggctggtcttgaactgggctcaagtgatccctctgccttggtctcccaaagtgctaggatcacaggtgtaagccactgtgcctggactaattttcatgtactttattttgtgaaactttaccgttgaggtctacatctcaatctccgccttgtggctctggtctgtccaactacagagctcagaacttgctacagtaattcagacagacgctgatgcaccagaagggaacacccccctggtgccccacggagggccatcctcccgtgcacctcaccagcatggtcccactgcacctattagaccatggagccctacagcagggcagngtgtattcccactccctccctggttgctgggcagctctgagcacaaaggcacagaactgatcccttaacttattcaactacgccccttcaaggaaggtcatggagattttcgagtcaataagcttaccctttccatttacatctttgtttaagcaatgtataaaaagttctcctatagttagcagatcatttacgagcagagtggaacactgcatttagcattcaaatacaattttattttactactcatccacagataaaaagctagtttccctttaatgagaagtgttactgttttcttaattcagcatactaccaagatagagaaga

SEQ ID NO: 4942 - DNA, 661 bp, Homo sapiens
  MGC35212
  misc_feature [331]..[331]: Chromosome 16, SNP identification no. = rs428123
  misc_feature [331]..[331]: allele = a, in linkage disequilibrium with rs2575357, respectively
  misc_feature [331]..[331]: n is a, t, c or g
ctggttgctgggcagctctgagcacaaaggcacagaactgatcccttaacttattcaactacgccccttcaaggaaggtcatggagattttcgagtcaataagcttaccctttccatttacatctttgtttaagcaatgtataaaaagttctcctatagttagcagatcatttacgagcagagtggaacactgcatttagcattcaaatacaattttattttactactcatccacagataaaaagctagtttccctttaatgagaagtgttactgttttcttaattcagcatactaccaagatagagaagaaaagttaccccagctgatcntgaccactccatcccaaacacagatcaagtgactgcacctcccctgccagattgcacttggctttgtcggggttttaacttaccgatttcacagctgcaagcacgttaataatcctcccattaagactgtgtccatttgcaacaatgtcacccagtgaataataatcatgagactctttaacaggtaaatgtatcaaagaaagtaactttgtgtccacttcataactggaacaaacttttactgttgagtgattctcactgagcaacagtttacagttgctaaattgcaaaaacacaagaaagttatttgaaagtgatctttggaaagaa

SEQ ID NO: 4943 - DNA, 661 bp, Homo sapiens
  MGC35212
  misc_feature [331]..[331]: Chromosome 16, SNP identification no. = rs408286
  misc_feature [331]..[331]: allele = c, in linkage disequilibrium with rs2575357, respectively
  misc_feature [331]..[331]: n is a, t, c or g
acttattcaactacgccccttcaaggaaggtcatggagattttcgagtcaataagcttaccctttccatttacatctttgtttaagcaatgtataaaaagttctcctatagttagcagatcatttacgagcagagtggaacactgcatttagcattcaaatacaattttattttactactcatccacagataaaaagctagtttccctttaatgagaagtgttactgttttcttaattcagcatactaccaagatagagaagaaaagttaccccagctgatcgtgaccactccatcccaaacacagatcaagtgactgcacctcccctgcnagattgcacttggctttgtcggggttttaacttaccgatttcacagctgcaagcacgttaataatcctcccattaagactgtgtccatttgcaacaatgtcacccagtgaataataatcatgagactctttaacaggtaaatgtatcaaagaaagtaactttgtgtccacttcataactggaacaaacttttactgttgagtgattctcactgagcaacagtttacagttgctaaattgcaaaaacacaagaaagttatttgaaagtgatctttggaaagaaaaatatttccaggtccacatttaaactacatttttcattgaaatttag

SEQ ID NO: 4944 - DNA, 661 bp, Homo sapiens
  MGC35212
  misc_feature [331]..[331]: Chromosome 16, SNP identification no. = rs411193
  misc_feature [331]..[331]: allele = t, in linkage disequilibrium with rs2575357, respectively
  misc_feature [331]..[331]: n is a, t, c or g
taccaagatagagaagaaaagttaccccagctgatcgtgaccactccatcccaaacacagatcaagtgactgcacctcccctgccagattgcacttggctttgtcggggttttaacttaccgatttcacagctgcaagcacgttaataatcctcccattaagactgtgtccatttgcaacaatgtcacccagtgaataataatcatgagactctttaacaggtaaatgtatcaaagaaagtaactttgtgtccacttcataactggaacaaacttttactgttgagtgattctcactgagcaacagtttacagttgctaaattgcaaaaanacaagaaagttatttgaaagtgatctttggaaagaaaaatatttccaggtccacatttaaactacatttttcattgaaatttagacaatactaatatatactttttactcttagaaacattgaataatacagcaaaacattttttgtttacagtgcactttcattaaggaaatgttttgagaattgattcgtgtcggggttctaaacataccatttgtctgatcttgcccaagactctgcgcttgtttccttctccaaaaaaataggagcaaaaaagcgctctgaaactttcaggggttatacaaacccaaggactggttgtttctctct

SEQ ID NO: 4945 - DNA, 661 bp, Homo sapiens
  MGC35212
  misc_feature [331]..[331]: Chromosome 16, SNP identification no. = rs410465
  misc_feature [331]..[331]: allele = t, in linkage disequilibrium with rs2575357, respectively
  misc_feature [331]..[331]: n is a, t, c or g
cttttactgttgagtgattctcactgagcaacagtttacagttgctaaattgcaaaaacacaagaaagttatttgaaagtgatctttggaaagaaaaatatttccaggtccacatttaaactacatttttcattgaaatttagacaatactaatatatactttttactcttagaaacattgaataatacagcaaaacattttttgtttacagtgcactttcattaaggaaatgttttgagaattgattcgtgtcggggttctaaacataccatttgtctgatcttgcccaagactctgcgcttgtttccttctccaaaaaaataggagcanaaaagcgctctgaaactttcaggggttatacaaacccaaggactggttgtttctctctcttatggacctggctgttctgccttagtgcctcaggtcagggactgtgtttttcctacccctactgagctctgcatggagcagacgcagaacactggcacagtgagcccgaactgaggagctctccctcctgcaccgagtccctcccggcccttgcactctgtgccccagcagtcctctaacccagccccacctcctccccactgctcggcctcacttacctacctcatcacttctctcccaagccactgccttgctatcctaactaagctt

SEQ ID NO: 4946 - DNA, 661 bp, Homo sapiens
  MGC35212
  misc_feature [331]..[331]: Chromosome 16, SNP identification no. = rs448374
  misc_feature [331]..[331]: allele = g, in linkage disequilibrium with rs2575357, respectively
  misc_feature [331]..[331]: n is a, t, c or g
cagttgctaaattgcaaaaacacaagaaagttatttgaaagtgatctttggaaagaaaaatatttccaggtccacatttaaactacatttttcattgaaatttagacaatactaatatatactttttactcttagaaacattgaataatacagcaaaacattttttgtttacagtgcactttcattaaggaaatgttttgagaattgattcgtgtcggggttctaaacataccatttgtctgatcttgcccaagactctgcgcttgtttccttctccaaaaaaataggagcaaaaaagcgctctgaaactttcaggggttatacaaacccnaggactggttgtttctctctcttatggacctggctgttctgccttagtgcctcaggtcagggactgtgtttttcctacccctactgagctctgcatggagcagacgcagaacactggcacagtgagcccgaactgaggagctctccctcctgcaccgagtccctcccggcccttgcactctgtgccccagcagtcctctaacccagccccacctcctccccactgctcggcctcacttacctacctcatcacttctctcccaagccactgccttgctatcctaactaagcttcattcccctacagtccatcctccataagcaaagtgatc

SEQ ID NO: 4947 - DNA, 661 bp, Homo sapiens
  MGC35212
  misc_feature [331]..[331]: Chromosome 16, SNP identification no. = rs1657121
  misc_feature [331]..[331]: allele = g, in linkage disequilibrium with rs2575357, respectively
  misc_feature [331]..[331]: n is a, t, c or g
tacatttttcattgaaatttagacaatactaatatatactttttactcttagaaacattgaataatacagcaaaacattttttgtttacagtgcactttcattaaggaaatgttttgagaattgattcgtgtcggggttctaaacataccatttgtctgatcttgcccaagactctgcgcttgtttccttctccaaaaaaataggagcaaaaaagcgctctgaaactttcaggggttatacaaacccaaggactggttgtttctctctcttatggacctggctgttctgccttagtgcctcaggtcagggactgtgtttttcctacccctnctgagctctgcatggagcagacgcagaacactggcacagtgagcccgaactgaggagctctccctcctgcaccgagtccctcccggcccttgcactctgtgccccagcagtcctctaacccagccccacctcctccccactgctcggcctcacttacctacctcatcacttctctcccaagccactgccttgctatcctaactaagcttcattcccctacagtccatcctccataagcaaagtgatcttcctaaaccacaaatatgaaaatattatttcccagctcaaagaccatcattgtggctaccagtcacaaaggaaataactcag

SEQ ID NO: 4948 - DNA, 661 bp, Homo sapiens
  MGC35212
  misc_feature [331]..[331]: Chromosome 16, SNP identification no. = rs1657122
  misc_feature [331]..[331]: allele = t, in linkage disequilibrium with rs2575357, respectively
  misc_feature [331]..[331]: n is a, t, c or g
cttgcccaagactctgcgcttgtttccttctccaaaaaaataggagcaaaaaagcgctctgaaactttcaggggttatacaaacccaaggactggttgtttctctctcttatggacctggctgttctgccttagtgcctcaggtcagggactgtgtttttcctacccctactgagctctgcatggagcagacgcagaacactggcacagtgagcccgaactgaggagctctccctcctgcaccgagtccctcccggcccttgcactctgtgccccagcagtcctctaacccagccccacctcctccccactgctcggcctcacttacctanctcatcacttctctcccaagccactgccttgctatcctaactaagcttcattcccctacagtccatcctccataagcaaagtgatcttcctaaaccacaaatatgaaaatattatttcccagctcaaagaccatcattgtggctaccagtcacaaaggaaataactcagtatgaaagcaaagctgtctgtaaaatatctctgcttccaccttaagcttctcctcctgcccgtgccctgcattccagccgtatcagactattacattatgaaattggtatttctagatgaaaaatagtaaaacatcagcagtttcatatggctcaaactaa

SEQ ID NO: 4949 - DNA, 661 bp, Homo sapiens
  MGC35212
  misc_feature [331]..[331]: Chromosome 16, SNP identification no. = rs449530
  misc_feature [331]..[331]: allele = g, in linkage disequilibrium with rs2575357, respectively
  misc_feature [331]..[331]: n is a, t, c or g
tactgagctctgcatggagcagacgcagaacactggcacagtgagcccgaactgaggagctctccctcctgcaccgagtccctcccggcccttgcactctgtgccccagcagtcctctaacccagccccacctcctccccactgctcggcctcacttacctacctcatcacttctctcccaagccactgccttgctatcctaactaagcttcattcccctacagtccatcctccataagcaaagtgatcttcctaaaccacaaatatgaaaatattatttcccagctcaaagaccatcattgtggctaccagtcacaaaggaaataactcngtatgaaagcaaagctgtctgtaaaatatctctgcttccaccttaagcttctcctcctgcccgtgccctgcattccagccgtatcagactattacattatgaaattggtatttctagatgaaaaatagtaaaacatcagcagtttcatatggctcaaactaatattaactgttctggaaaagacaggaggtttcctgtttcttccctctaccaagaatattctctccatctaaccatccatccatcacttccatgaatactgagaatctgttatataccagaccctatgctaggcacaagggatatggtggtgaagaaggcagacaagac

SEQ ID NO: 4950 - DNA, 661 bp, Homo sapiens
  MGC35212
  misc_feature [331]..[331]: Chromosome 16, SNP identification no. = rs420681
  misc_feature [331]..[331]: allele = a, in linkage disequilibrium with rs2575357, respectively
  misc_feature [331]..[331]: n is a, t, c or g
aacccaagtcaccgtctgagattgtttgattcattgttcttgggtctccccctcacatatgtgagcctcatgagatcaaaggtcttgtctgccttcttcaccaccatatcccttgtgcctagcatagggtctggtatataacagattctcagtattcatggaagtgatggatggatggttagatggagagaatattcttggtagagggaagaaacaggaaacctcctgtcttttccagaacagttaatattagtttgagccatatgaaactgctgatgttttactatttttcatctagaaataccaatttcataatgtaatagtctgatanggctggaatgcagggcacgggcaggaggagaagcttaaggtggaagcagagatattttacagacagctttgctttcatactgagttatttcctttgtgactggtagccacaatgatggtctttgagctgggaaataatattttcatatttgtggtttaggaagatcactttgcttatggaggatggactgtaggggaatgaagcttagttaggatagcaaggcagtggcttgggagagaagtgatgaggtaggtaagtgaggccgagcagtggggaggaggtggggctgggttagaggactgctggggcacagagtgcaagggccgggag

SEQ ID NO: 4951 - DNA, 661 bp, Homo sapiens
  MGC35212
  misc_feature [331]..[331]: Chromosome 16, SNP identification no. = rs448961
  misc_feature [331]..[331]: allele = g, in linkage disequilibrium with rs2575357, respectively
  misc_feature [331]..[331]: n is a, t, c or g
tacagtccatcctccataagcaaagtgatcttcctaaaccacaaatatgaaaatattatttcccagctcaaagaccatcattgtggctaccagtcacaaaggaaataactcagtatgaaagcaaagctgtctgtaaaatatctctgcttccaccttaagcttctcctcctgcccgtgccctgcattccagccgtatcagactattacattatgaaattggtatttctagatgaaaaatagtaaaacatcagcagtttcatatggctcaaactaatattaactgttctggaaaagacaggaggtttcctgtttcttccctctaccaagaatnttctctccatctaaccatccatccatcacttccatgaatactgagaatctgttatataccagaccctatgctaggcacaagggatatggtggtgaagaaggcagacaagacctttgatctcatgaggctcacatatgtgagggggagacccaagaacaatgaatcaaacaatctcagacggtgacttgggttatgctgacaaaagccagggcaaaatcccagtaattgaccattagcgctaccacaaacagagtagatggggaaggttgaagaagatgacatttaagctgtgagtcaataacccaaagaagcaaatagtcaaacagatgg

SEQ ID NO: 4952 - DNA, 661 bp, Homo sapiens
  MGC35212
  misc_feature [331]..[331]: Chromosome 16, SNP identification no. = rs2754187
  misc_feature [331]..[331]: allele = a, in linkage disequilibrium with rs2575357, respectively
  misc_feature [331]..[331]: n is a, t, c or g
tatttctagatgaaaaatagtaaaacatcagcagtttcatatggctcaaactaatattaactgttctggaaaagacaggaggtttcctgtttcttccctctaccaagaatattctctccatctaaccatccatccatcacttccatgaatactgagaatctgttatataccagaccctatgctaggcacaagggatatggtggtgaagaaggcagacaagacctttgatctcatgaggctcacatatgtgagggggagacccaagaacaatgaatcaaacaatctcagacggtgacttgggttatgctgacaaaagccagggcaaaatccnagtaattgaccattagcgctaccacaaacagagtagatggggaaggttgaagaagatgacatttaagctgtgagtcaataacccaaagaagcaaatagtcaaacagatgggagaaagttctatgcagagagagaatagaaaatacaaaagtttggccaggcgcggtggctcacgcctgtaatcccagccctttgggaggccgaggcgggcggatcacttgaggtcaggagttcgacaccagcctggccaacatagcaaaaccccgcctctactaaaaatacaaaaattagctgggtgtggggcgtgtgcctgtaatcacagctacttggg

SEQ ID NO: 4953 - DNA, 661 bp, Homo sapiens
  MGC35212
  misc_feature [331]..[331]: Chromosome 16, SNP identification no. = rs427732
  misc_feature [331]..[331]: allele = g, in linkage disequilibrium with rs2575357, respectively
  misc_feature [331]..[331]: n is a, t, c or g
ccagcctgggcaacagagtgggactctgtctcagtaaaaaataaaaaataaaaataaaaggaaatacaaacgttcttagtgcagaatgagttcacggtgttcatgaaatataaagaaattcactgtggctacagagaaatgaggcttgagagtctggcataagatgaggtcagaaaagaaggtgggaacgggtcacagttgatgcgagtgtaaatgctgtagactgctgtgcccaccaagagccctttacaggctggtacagggcacagctacacccttctctccagaactgccagacccgcctttgagctgatgccccgccccatcctgngggtttggggagtggatggactacagccagggcactgctctaaggggccactcccactccagagctccctcccggctcctgctgaggctccaggtgaacccacttctctgctcagctgcttcctggtctatcctcgcagggttcccctgagagctcaccctcaaccaaccactcccacaagagtcctcctctcaagctctgcttcgaaggaatctgccctaagatggtaagcctgtgagtagaaggataccttgacatgaaaaaagacagatgtaatttccaaagtttatcttttctcctcattcagttttaacatgacaaagtcaaatt

SEQ ID NO: 4954 - DNA, 661 bp, Homo sapiens
  MGC35212
  misc_feature [331]..[331]: Chromosome 16, SNP identification no. = rs433268
  misc_feature [331]..[331]: allele = g, in linkage disequilibrium with rs2575357, respectively
  misc_feature [331]..[331]: n is a, t, c or g
ttcgaaggaatctgccctaagatggtaagcctgtgagtagaaggataccttgacatgaaaaaagacagatgtaatttccaaagtttatcttttctcctcattcagttttaacatgacaaagtcaaatttttgtaaatctaagaatgagaatcaaagtactaaaaccaaagccatttatcatgtgactctgtatcaaagtaaattatgtcataatcaaagatgaattttgtaagagaaaattaaactcctcatttttattgaaatagaaacagaacacttttagtaagatctctgctaatctgatacaacattattagtaatgatcattctngcacaatctctgtgctagacagatgcttacctaggagttgcagggctgaatttttcttctctttctatttcctttctttggatcagaggattttcaattatcactaaaacagagggcaaagtatgatgatattacaaaacagtaacaagataaacactaacatcctaaataacatcctgtttaatttatgatcatcatcgactctaggctttaaaaattcctcacctcattcatcttctccatcatcaacatataacatattttgatactgagatgtcaaaattgaaatctttatctccatatgtaactaatattccagcatttattcaa

SEQ ID NO: 4955 - DNA, 661 bp, Homo sapiens
  misc_feature [331]..[331]: Chromosome 16, SNP identification no. = rs2492881
  misc_feature [331]..[331]: allele = a, in linkage disequilibrium with rs2575357, respectively
  misc_feature [331]..[331]: n is a, t, c or g
ggctcactgcaacctgcgcctcccaggttcaagcgattctcctgcctcagcctcccgagtagctgggaatacaagcgcctgccaccatgcctgactaattttgtatttttagtagagagggggtttctacatgttggttaggctggtcccaaactcctgacctcaggtgatccgcccacctcagcctcccaaactgctgggattacaggcgtgaccactgtgcctggcaaaaaaccgtgtatttcatttttataattttagcaagtattttaataactacttttttctaattcacacattttaagtgatgccttctgaaatttggtaaaangagatatagacttcctcaaactatttatttagtatttctgatctaattagttaagatgaaataaagtgcaggcacaaatgatatgggtaccagatgacagcttggttatttaccttaaagataaaagcatcatgcctgtaatctgatcactctaggaggatgaggtgggatgatcacttgagcccaggagtttgagaccagcctgggcaacagagcaagactctgtctctacaaatttttgttttttttaaatcaaccaggggctgggcatggtggctcacacctgtaattccagcactttgggaggccgaggcagggagatcacttgag

SEQ ID NO: 4956 - DNA, 661 bp, Homo sapiens
  misc_feature [331]..[331]: Chromosome 16, SNP identification no. = rs378201
  misc_feature [331]..[331]: allele = c, in linkage disequilibrium with rs2575357, respectively
  misc_feature [331]..[331]: n is a, t, c or g
gtcccaaactcctgacctcaggtgatccgcccacctcagcctcccaaactgctgggattacaggcgtgaccactgtgcctggcaaaaaaccgtgtatttcatttttataattttagcaagtattttaataactacttttttctaattcacacattttaagtgatgccttctgaaatttggtaaaaggagatatagacttcctcaaactatttatttagtatttctgatctaattagttaagatgaaataaagtgcaggcacaaatgatatgggtaccagatgacagcttggttatttaccttaaagataaaagcatcatgcctgtaatctnatcactctaggaggatgaggtgggatgatcacttgagcccaggagtttgagaccagcctgggcaacagagcaagactctgtctctacaaatttttgttttttttaaatcaaccaggggctgggcatggtggctcacacctgtaattccagcactttgggaggccgaggcagggagatcacttgaggtcaggagttcaagaccagcctggccaaaatggtgaaaccccatctctactaaaaatacaaaaattagctgggcatgatggcatgtgcctgtaattccagctactcgggaggttgaagcaggagaatcgattgaacccaggaggc

SEQ ID NO: 4957 - DNA, 661 bp, Homo sapiens
  misc_feature [331]..[331]: Chromosome 16, SNP identification no. = rs404413
  misc_feature [331]..[331]: allele = c, in linkage disequilibrium with rs2575357, respectively
  misc_feature [331]..[331]: n is a, t, c or g
gtgatccgcccacctcagcctcccaaactgctgggattacaggcgtgaccactgtgcctggcaaaaaaccgtgtatttcatttttataattttagcaagtattttaataactacttttttctaattcacacattttaagtgatgccttctgaaatttggtaaaaggagatatagacttcctcaaactatttatttagtatttctgatctaattagttaagatgaaataaagtgcaggcacaaatgatatgggtaccagatgacagcttggttatttaccttaaagataaaagcatcatgcctgtaatctgatcactctaggaggatgaggngggatgatcacttgagcccaggagtttgagaccagcctgggcaacagagcaagactctgtctctacaaatttttgttttttttaaatcaaccaggggctgggcatggtggctcacacctgtaattccagcactttgggaggccgaggcagggagatcacttgaggtcaggagttcaagaccagcctggccaaaatggtgaaaccccatctctactaaaaatacaaaaattagctgggcatgatggcatgtgcctgtaattccagctactcgggaggttgaagcaggagaatcgattgaacccaggaggcagaggttgcagtgagtcgaga

SEQ ID NO: 4958 - DNA, 661 bp, Homo sapiens
  misc_feature [331]..[331]: Chromosome 16, SNP identification no. = rs11640914
  misc_feature [331]..[331]: allele = g, in linkage disequilibrium with rs2575357, respectively
  misc_feature [331]..[331]: n is a, t, c or g
ttgttttttttaaatcaaccaggggctgggcatggtggctcacacctgtaattccagcactttgggaggccgaggcagggagatcacttgaggtcaggagttcaagaccagcctggccaaaatggtgaaaccccatctctactaaaaatacaaaaattagctgggcatgatggcatgtgcctgtaattccagctactcgggaggttgaagcaggagaatcgattgaacccaggaggcagaggttgcagtgagtcgagatcgtgccattgcactccagcctgagtgacagagcgagcctccatctcaaaaaaaaaaagagagaacacatgtnctcaaatatacatatatacacacacgtgtacacacatacacacacatacacatgcacacacatacacacgtgtgtgtatacacataaacatatatacacatatgtgtgtatgtatacatatatatagagagagagagagaatgtgggagggagggagagagaaagccttgaatcaggtacttgaccatccaatagagagcatgaccattgctcttaaggagttaaacaggcatagaaaaattaatcacttcaatatactttgttgtagtcataagccaaagttgatgaaaaatgaaaccaagagttaaacagaactcagctttttctgtc

SEQ ID NO: 4959 - DNA, 661 bp, Homo sapiens
  misc_feature [331]..[331]: Chromosome 16, SNP identification no. = rs453494
  misc_feature [331]..[331]: allele = t, in linkage disequilibrium with rs2575357, respectively
  misc_feature [331]..[331]: n is a, t, c or g
tatttcttaaaacacatttaaaatttttcttcagtagtcactaaagagaacattaaacattttgaggagatgttaatatctctaagttttaagatctaggactttagaatttagatttattagcagcaaaatataagttttgttacagtctaatttatattactgtccagcatgtttggattaagaagctaagtgattttatgtggattgttagaaaaccctatataaaggaaagctttgaagactgtggcaaattaaattgcattatacatgtgctttggatgaattcagtaaggattgatagcatagggcagttattatgctccatctngtgattgaaaataaagtagaaatatgctaagtattaaatgattatatttgtaatagtagttaacttttggattactttatactattccttgtggaattgaacatttatgaacttcttttagatgtttgcctggaataaatacatttaaatggttcctagtcagaaatgtttgttagagccagtaaagtataacaagcccatgaaattaaatttatcaagtacatctgtgtttaatattggtcttctgtgacctttttgtttttcagaaagttatcggtatagttattgggaaaacagatgtcaaaggctttccagacagaaaaagctgag

SEQ ID NO: 4960 - DNA, 661 bp, Homo sapiens
  misc_feature [331]..[331]: Chromosome 16, SNP identification no. = rs404772
  misc_feature [331]..[331]: allele = c, in linkage disequilibrium with rs2575357, respectively
  misc_feature [331]..[331]: n is a, t, c or g
aactcttctgaaaaaaaaaaaaaaaaaaaaaaaaaaaaaaattaaaccattttgttcagcagtagcaattttctgaccaaattatccaatttatggtctaagtacttgacattatgctgcttttatgatataggtttataacatgtgtgttttctacaatgatgatgtgaaaattgactctttgagtaggagttataggggaattcaatgattttgaacacatctcgactgttacttacttaaaagaaaactaagtggaatcatcttataagttaaagaacttattgtaaagcagctaccacacacccttaccttccctgcccctgagcantctgctatttatattttgcttttgcaaactagatttcttacaatgggatacatttacatataactttaataatttaaaattttaaaatattaaaaaataacaattgttgttatagtttttcttgaaaggtaaactatttgctaataatggtctcttcagatagaaagttttactcaacatttccattaattggattttccaacaaaattcagtgagatctgcaagtataaggaattgaagaaataatatcaatgtgtctaaataagcaataaagctagctaatagctcagctagaatgtaggagtcttaaaagcctgattgtaatttaaa

SEQ ID NO: 4961 - DNA, 661 bp, Homo sapiens
  misc_feature [331]..[331]: Chromosome 16, SNP identification no. = rs9935266
  misc_feature [331]..[331]: allele = g, in linkage disequilibrium with rs2575357, respectively
  misc_feature [331]..[331]: n is a, t, c or g
ttttaactttttttctttttttgagacatcagtctcactctgtgccccagggtggagtgcagtggcacaatctcagttcaccacaacatccgcctcccaggctcaagcgattcttctgcctcagcctcccaaatagctgggattacaggcgcctgccaccatgcccagccaatttttgtatttttagtagagacgaggtttcaccatgttggccaggctggtcttgaactcctgatctcaagtgatccggccgcccccaaagtgctggattacaggcgtgagccaccaagcccagccaaatttagagttttacatgcaagatgattcaatnggacattttttttttgagatggagtttcactctgttgcctaggctggagtgcagtggtgcaatctcagctcactgcaagctccacctcctgggttcacgccattctcccacctcagcctcccgagtagctgggattacaggcacctgccaccacgcctggctaattttgtttttgcatttttagtagagacggggtttcaccgtgttagccaggatggtctccatctcctgacctcgtgatccgcccacctcggcctcccaaagtgctgggattacaggcatgagccaccacgcccggcctcagtgggacatttaaggatttaaatatat

SEQ ID NO: 4962 - DNA, 661 bp, Homo sapiens
  misc_feature [331]..[331]: Chromosome 16, SNP identification no. = rs447782
  misc_feature [331]..[331]: allele = t, in linkage disequilibrium with rs2575357, respectively
  misc_feature [331]..[331]: n is a, t, c or g
cctcagcctcccgagtagctgggactacaggcatgtgtcacctcacccagctaatttttttgtatttttagtagagatggggtttcactgtgttagccaggatggtctcgatctcctgacctgatgatccacccgcatcagcctcccaaagtgctgggattacaggcgtgagccactgagcccagcccgggaaaattattgattttaaacacacctctacatagtaaaactacatgagggcagaggtggcatcttacgtatttttatgtatgtatttcataactgaaaaccataaatatcagatgaacgaaatggtggtttgtccctcaanatcatcactctaaaaggttctattgtagaaaaattgtaagctacaccaaacagattgacttcactttataatccagggcctctttaactctgggaatgcccacacccacccgctccagttcaaggacgtgtctcatgacacctgaatttcaggcagcctgtggagttagtcaaatatgattttgaattgcaacaccactagtttgtagtcgtgtgttttaacattactaaacattaatttcctcatccttaaattgtggataacatccacctggcagtgaaaagtagaaacagtgtatacaagatgcctcgatgttcacaggctcacagt

SEQ ID NO: 4963 - DNA, 661 bp, Homo sapiens
  misc_feature [331]..[331]: Chromosome 16, SNP identification no. = rs1657094
  misc_feature [331]..[331]: allele = c, in linkage disequilibrium with rs2575357, respectively
  misc_feature [331]..[331]: n is a, t, c or g
ggtggtttgtccctcaacatcatcactctaaaaggttctattgtagaaaaattgtaagctacaccaaacagattgacttcactttataatccagggcctctttaactctgggaatgcccacacccacccgctccagttcaaggacgtgtctcatgacacctgaatttcaggcagcctgtggagttagtcaaatatgattttgaattgcaacaccactagtttgtagtcgtgtgttttaacattactaaacattaatttcctcatccttaaattgtggataacatccacctggcagtgaaaagtagaaacagtgtatacaagatgcctcgangttcacaggctcacagtcaatgatggccctgcttgtcaatattatccaatgtaccagtttttgtattcaaggcctttcagtgccagaagaaacatttgggaattaagctgtgtcaagtttttcattcgttctttggcctggtctgatgtggctcacaatgcagtgtcactatctaaaacacttgccgaactgtgacaaattcattcactcattcaaccattcaactaatatttatttacagcccaaagtgccagacatgtgagtcgagaggatgagtcagacatttgactcagtggctgaatattctgtacaaacacaactacctacaca

SEQ ID NO: 4964 - DNA, 661 bp, Homo sapiens
  misc_feature [331]..[331]: Chromosome 16, SNP identification no. = rs1657095
  misc_feature [331]..[331]: allele = g, in linkage disequilibrium with rs2575357, respectively
  misc_feature [331]..[331]: n is a, t, c or g
aattgtaagctacaccaaacagattgacttcactttataatccagggcctctttaactctgggaatgcccacacccacccgctccagttcaaggacgtgtctcatgacacctgaatttcaggcagcctgtggagttagtcaaatatgattttgaattgcaacaccactagtttgtagtcgtgtgttttaacattactaaacattaatttcctcatccttaaattgtggataacatccacctggcagtgaaaagtagaaacagtgtatacaagatgcctcgatgttcacaggctcacagtcaatgatggccctgcttgtcaatattatccantgtaccagtttttgtattcaaggcctttcagtgccagaagaaacatttgggaattaagctgtgtcaagtttttcattcgttctttggcctggtctgatgtggctcacaatgcagtgtcactatctaaaacacttgccgaactgtgacaaattcattcactcattcaaccattcaactaatatttatttacagcccaaagtgccagacatgtgagtcgagaggatgagtcagacatttgactcagtggctgaatattctgtacaaacacaactacctacacaccaagggatttctccacatttttaccccttagcatctcttggtgggaca

SEQ ID NO: 4965 - DNA, 661 bp, Homo sapiens
  misc_feature [331]..[331]: Chromosome 16, SNP identification no. = rs2917523
  misc_feature [331]..[331]: allele = c, in linkage disequilibrium with rs2575357, respectively
  misc_feature [331]..[331]: n is a, t, c or g
gaatgcccacacccacccgctccagttcaaggacgtgtctcatgacacctgaatttcaggcagcctgtggagttagtcaaatatgattttgaattgcaacaccactagtttgtagtcgtgtgttttaacattactaaacattaatttcctcatccttaaattgtggataacatccacctggcagtgaaaagtagaaacagtgtatacaagatgcctcgatgttcacaggctcacagtcaatgatggccctgcttgtcaatattatccaatgtaccagtttttgtattcaaggcctttcagtgccagaagaaacatttgggaattaagctgngtcaagtttttcattcgttctttggcctggtctgatgtggctcacaatgcagtgtcactatctaaaacacttgccgaactgtgacaaattcattcactcattcaaccattcaactaatatttatttacagcccaaagtgccagacatgtgagtcgagaggatgagtcagacatttgactcagtggctgaatattctgtacaaacacaactacctacacaccaagggatttctccacatttttaccccttagcatctcttggtgggacatggtatcctattatctctctgaattcccttatttgtctgctaccgttagaggtatatggtaa

SEQ ID NO: 4966 - DNA, 661 bp, Homo sapiens
  misc_feature [331]..[331]: Chromosome 16, SNP identification no. = rs2974856
  misc_feature [331]..[331]: allele = a, in linkage disequilibrium with rs2575357, respectively
  misc_feature [331]..[331]: n is a, t, c or g
cgctccagttcaaggacgtgtctcatgacacctgaatttcaggcagcctgtggagttagtcaaatatgattttgaattgcaacaccactagtttgtagtcgtgtgttttaacattactaaacattaatttcctcatccttaaattgtggataacatccacctggcagtgaaaagtagaaacagtgtatacaagatgcctcgatgttcacaggctcacagtcaatgatggccctgcttgtcaatattatccaatgtaccagtttttgtattcaaggcctttcagtgccagaagaaacatttgggaattaagctgtgtcaagtttttcattcnttctttggcctggtctgatgtggctcacaatgcagtgtcactatctaaaacacttgccgaactgtgacaaattcattcactcattcaaccattcaactaatatttatttacagcccaaagtgccagacatgtgagtcgagaggatgagtcagacatttgactcagtggctgaatattctgtacaaacacaactacctacacaccaagggatttctccacatttttaccccttagcatctcttggtgggacatggtatcctattatctctctgaattcccttatttgtctgctaccgttagaggtatatggtaatagacgttagtgtctgc

SEQ ID NO: 4967 - DNA, 661 bp, Homo sapiens
  misc_feature [331]..[331]: Chromosome 16, SNP identification no. = rs2982235
  misc_feature [331]..[331]: allele = a, in linkage disequilibrium with rs2575357, respectively
  misc_feature [331]..[331]: n is a, t, c or g
tgaccaggtagagaagcaagtcatattttttgtgggcagacactaacgtctattaccatatacctctaacggtagcagacaaataagggaattcagagagataataggataccatgtcccaccaagagatgctaaggggtaaaaatgtggagaaatcccttggtgtgtaggtagttgtgtttgtacagaatattcagccactgagtcaaatgtctgactcatcctctcgactcacatgtctggcactttgggctgtaaataaatattagttgaatggttgaatgagtgaatgaatttgtcacagttcggcaagtgttttagatagtgacantgcattgtgagccacatcagaccaggccaaagaacgaatgaaaaacttgacacagcttaattcccaaatgtttcttctggcactgaaaggccttgaatacaaaaactggtacattggataatattgacaagcagggccatcattgactgtgagcctgtgaacatcgaggcatcttgtatacactgtttctacttttcactgccaggtggatgttatccacaatttaaggatgaggaaattaatgtttagtaatgttaaaacacacgactacaaactagtggtgttgcaattcaaaatcatatttgactaactccacaggctgcctgaaat

SEQ ID NO: 4968 - DNA, 661 bp, Homo sapiens
  misc_feature [331]..[331]: Chromosome 16, SNP identification no. = rs173164
  misc_feature [331]..[331]: allele = a, in linkage disequilibrium with rs2575357, respectively
  misc_feature [331]..[331]: n is a, t, c or g
aaatgctagcttgcccttgccgcttgatgcagaagtcaagggtgagcgaacaagggtcagagctgaaatagctcacatgtctggctaaagaaacggtagttggctacatggtcagctccccagagcatgccagctgtcaaaacatctaggagctgtcacaaaggagtgacaggcaaaatatatagtcataaactttacacgttctaatcagtagaaacgttgacagttattttaatgaattacaagatagaaattcattaaaaattgacagttattttaatgaattacaagataagcttttatttatttaacaaaactataacttttccancattgatcccgtgactatggtcttcctcccaggagctgaaatactaatagatcagttactggcataattagtctcacccccactcgtcactccatcaaaggactgatcatcttttttgtttttctcccaaaacagggtctcactctgtcacccaggctggagtgcagtggcacgatcacagttcactgcagcctcgacctccctgggctcaggtgatcctcccacctcagcctcccgtgggaccgtaggtgcacaccaccacgccggctaagttttgtatttttttgtagagatggggtctcgctatattgcccaagctggtcttgaact

SEQ ID NO: 4969 - DNA, 661 bp, Homo sapiens
  misc_feature [331]..[331]: Chromosome 16, SNP identification no. = rs1865818
  misc_feature [331]..[331]: allele = a, in linkage disequilibrium with rs7200468, respectively
  misc_feature [331]..[331]: n is a, t, c or g
tgctaccctgtaatgttttcctttggccaaactcagtagggaaggggatccatcaatatggtttcagggcacagaatagagtggataaggacagagagtggatctggggggacaaatggagaaatctgtcctgcatagatcctagcacagtgttgatctctcagtgagtcaataaatggtaatgaacatgggtatcaggagctcacattcccattgggagtgaggaaacagctggcattattattccagtttgtccctgaggcttaaaaaaatgggagggcctctcatgtctttactagcagacctgccttccctgttacctacaattcanttctctcattttctgtctttcttcaccagccactggagggaggttttctctatccatttgtgcagttataacaaaatgatgagactgagtgaattattaagaatgacaatttattttctcacagttctggaggctgggaagtccaagatcaaggtgttggcatttggcgtctggtgagggccttcctcctgcatccccacatggtggatggggccaaaaagggtaacagggacaaatgctatgtactcacatgatggaaatggagaagagccagaaagggagccaaagctagttgcctccagccctgttacaagggatcaatctattcat

SEQ ID NO: 4970 - DNA, 661 bp, Homo sapiens
  misc_feature [331]..[331]: Chromosome 16, SNP identification no. = rs1865819
  misc_feature [331]..[331]: allele = t, in linkage disequilibrium with rs7200468, respectively
  misc_feature [331]..[331]: n is a, t, c or g
ccctgttacctacaattcagttctctcattttctgtctttcttcaccagccactggagggaggttttctctatccatttgtgcagttataacaaaatgatgagactgagtgaattattaagaatgacaatttattttctcacagttctggaggctgggaagtccaagatcaaggtgttggcatttggcgtctggtgagggccttcctcctgcatccccacatggtggatggggccaaaaagggtaacagggacaaatgctatgtactcacatgatggaaatggagaagagccagaaagggagccaaagctagttgcctccagccctgttanaagggatcaatctattcatgagggctgtgcttgccaaaggcccttacctcttaataccaacataatgaggatgaactttcaacaggaattttggagggagcaccagagttccaaccttagcagaggtgaacaagttgcaagtctgctttgctgttcaagggtgaaaaatcaagcccaagacagtgaaaccagctattggaagttcattaaggaatcaggtctttgccagggactgtcatcagtgggaaagacaagagctgaaagctaaacaaacctggtaatgccccgggataagcttccctaattagcacagaggtgactgcaggatca

SEQ ID NO: 4971 - DNA, 661 bp, Homo sapiens
  misc_feature [331]..[331]: Chromosome 16, SNP identification no. = rs12925737
  misc_feature [331]..[331]: allele = a, in linkage disequilibrium with rs7200468, respectively
  misc_feature [331]..[331]: n is a, t, c or g
ggggccaaaaagggtaacagggacaaatgctatgtactcacatgatggaaatggagaagagccagaaagggagccaaagctagttgcctccagccctgttacaagggatcaatctattcatgagggctgtgcttgccaaaggcccttacctcttaataccaacataatgaggatgaactttcaacaggaattttggagggagcaccagagttccaaccttagcagaggtgaacaagttgcaagtctgctttgctgttcaagggtgaaaaatcaagcccaagacagtgaaaccagctattggaagttcattaaggaatcaggtctttgccanggactgtcatcagtgggaaagacaagagctgaaagctaaacaaacctggtaatgccccgggataagcttccctaattagcacagaggtgactgcaggatcactgatgctgtcagcccagctcagccctctgaaagccttcacgtcgtcaggggctcttcttattccttggcccactgatgttcccaaatgctctttctaaacctctcagagccacttaccgaagcagccagcctttccccactggaggagcaggatctccaggaagagaaggaatagttagaaaaatgtcttgccatggcctgggggagaagctagagctaccccccgac

SEQ ID NO: 4972 - DNA, 661 bp, Homo sapiens
  misc_feature [331]..[331]: Chromosome 16, SNP identification no. = rs1436397
  misc_feature [331]..[331]: allele = c, in linkage disequilibrium with rs7200468, respectively
  misc_feature [331]..[331]: n is a, t, c or g
aatctattcatgagggctgtgcttgccaaaggcccttacctcttaataccaacataatgaggatgaactttcaacaggaattttggagggagcaccagagttccaaccttagcagaggtgaacaagttgcaagtctgctttgctgttcaagggtgaaaaatcaagcccaagacagtgaaaccagctattggaagttcattaaggaatcaggtctttgccagggactgtcatcagtgggaaagacaagagctgaaagctaaacaaacctggtaatgccccgggataagcttccctaattagcacagaggtgactgcaggatcactgatgctntcagcccagctcagccctctgaaagccttcacgtcgtcaggggctcttcttattccttggcccactgatgttcccaaatgctctttctaaacctctcagagccacttaccgaagcagccagcctttccccactggaggagcaggatctccaggaagagaaggaatagttagaaaaatgtcttgccatggcctgggggagaagctagagctaccccccgacacctcctccagcaggcaccagtgatggctgagcctggcccagtgggaagatgaggcattcaggctttggtgtgaaatgtctaggtaaatactgactcctttgtttatttg

SEQ ID NO: 4973 - DNA, 661 bp, Homo sapiens
  misc_feature [331]..[331]: Chromosome 16, SNP identification no. = rs1436398
  misc_feature [331]..[331]: allele = g, in linkage disequilibrium with rs7200468, respectively
  misc_feature [331]..[331]: n is a, t, c or g
accagagttccaaccttagcagaggtgaacaagttgcaagtctgctttgctgttcaagggtgaaaaatcaagcccaagacagtgaaaccagctattggaagttcattaaggaatcaggtctttgccagggactgtcatcagtgggaaagacaagagctgaaagctaaacaaacctggtaatgccccgggataagcttccctaattagcacagaggtgactgcaggatcactgatgctgtcagcccagctcagccctctgaaagccttcacgtcgtcaggggctcttcttattccttggcccactgatgttcccaaatgctctttctaaacntctcagagccacttaccgaagcagccagcctttccccactggaggagcaggatctccaggaagagaaggaatagttagaaaaatgtcttgccatggcctgggggagaagctagagctaccccccgacacctcctccagcaggcaccagtgatggctgagcctggcccagtgggaagatgaggcattcaggctttggtgtgaaatgtctaggtaaatactgactcctttgtttatttgtgctggacagtgacaacacaattacttaacctctcagagccttctttttccaccatgatggaacctacctccctattgtcctgggcagtaaga

SEQ ID NO: 4974 - DNA, 661 bp, Homo sapiens
  misc_feature [331]..[331]: Chromosome 16, SNP identification no. = rs6500724
  misc_feature [331]..[331]: allele = c, in linkage disequilibrium with rs7200468, respectively
  misc_feature [331]..[331]: n is a, t, c or g
ggtttatagttctccttgaagaggtcctttacgtcccttgtaagttggattcctaggtattttattctctttgaagcaattgtgaatgggagttcactcatgatttggctctctgtttgtctgttattggtgtataagaaagattgtgatttttgtgcattgattttgtatcctgagactttgctgaagttgattatcagcttaaggagattttgggctgagacaatggggttttctagatatacaatcatgtcatgtgcaaacagggacaatttgactccctgttttcctaattaaataccctttgtttccttctcctgcctaatttccntggccacaacttccaacactatgttgaataggagtggtgagagagggcatccctgtcttgtgccagttttcaaaccctaacgctgcgtatctacaactatctggtctttgacaaacctgagaaaaacaagcaatggggaaaggattccctacttaataaatggtggtgggaaaactggctagccacatggagaaagctgaaactggatcccttccttacaccttatacaaaaattaattcaagatggattcaagacttaaacattagacctaaaaccataaaaaccctagaagaaaacctaggcattaccattcaggacataggcacagg

SEQ ID NO: 4975 - DNA, 661 bp, Homo sapiens
  misc_feature [331]..[331]: Chromosome 16, SNP identification no. = rs9938377
  misc_feature [331]..[331]: allele = c, in linkage disequilibrium with rs7200468, respectively
  misc_feature [331]..[331]: n is a, t, c or g
aggagtagggtcttcatacaataaacccagacttccatcccatttgggactaagacctcatagcttccttgttcactactgagcctcctgctttggtagctcccctctgagttacgtgtatgtgtgcaaaaggaaatcatcacaaaattcaaattgcctcaactgggaatgttctcttgtttagaaaaaaaaattattaagttatgattggtattctggaaacttcacacatatgaagagtaaaattgggtaagtattgagctttgcatatacttgtgaaaccatcaccacagtcaggataatgaaaatatccatcactccaatgggtttntttgtgtacctttgcagtccctcgctcctgcccctccctgctcccatcctcctcagacaaccactgatctgctttctaaatccgtacattggtttgcagtttttagaattttatataaatgaaatcttatggaacaaatttttttttttttttttttttttgagatggagtctgtcacccaggctgcagtgcaatggtgcgatctcggctcactgcaacttccgcctcccaggttcttccacctcagcctcccaagtagctgggattacaggcacccgccatcatgcccagctaatttttatacttttagtagagacggggtttccctgg

SEQ ID NO: 4976 - DNA, 661 bp, Homo sapiens
  misc_feature [331]..[331]: Chromosome 16, SNP identification no. = rs2342740
  misc_feature [331]..[331]: allele = a, in linkage disequilibrium with rs7200468, respectively
  misc_feature [331]..[331]: n is a, t, c or g
ccagctggaacaaagtattttttttttttttttaagatggaatctcattctgtcaccaggctggagtgcagtggcacaatctcagctcaccgcaacctctgccttccaggttaaagtgattttcctgcctcagcctcctgagtagctgggattacaggcatgcaccaccacattgagctaatttttgtaattttagtagagacagggtttcacgatgttggcctgggtggtgtccatctcctgacttcgtggtctgcccgccttggcctcccaaagtgctgggattacagacgtgagccaccacactaggccaggacaaactatttttaangcattattgagatgtaattgacgtgctataatattcacctattgtttctatgaaatacaatatagatcttgactgaatttatggagtcatgtaggcgttaccacaatttagctttagaactccatcacctcagaaatatctcatttgtagttaatctactctccctcaacctccagctccagggaactgctaaaactccaggaaatgactgatctgatttctatctctaggaatttgccctttctggacgtttcatgtaattgaatagaaagaacgtagtcttttgcacctggctcctttggcttactgtaatggttttcaggttcaccc

SEQ ID NO: 4977 - DNA, 661 bp, Homo sapiens
  misc_feature [331]..[331]: Chromosome 16, SNP identification no. = rs2342741
  misc_feature [331]..[331]: allele = a, in linkage disequilibrium with rs7200468, respectively
  misc_feature [331]..[331]: n is a, t, c or g
ttttttttttaagatggaatctcattctgtcaccaggctggagtgcagtggcacaatctcagctcaccgcaacctctgccttccaggttaaagtgattttcctgcctcagcctcctgagtagctgggattacaggcatgcaccaccacattgagctaatttttgtaattttagtagagacagggtttcacgatgttggcctgggtggtgtccatctcctgacttcgtggtctgcccgccttggcctcccaaagtgctgggattacagacgtgagccaccacactaggccaggacaaactatttttaaggcattattgagatgtaattgacntgctataatattcacctattgtttctatgaaatacaatatagatcttgactgaatttatggagtcatgtaggcgttaccacaatttagctttagaactccatcacctcagaaatatctcatttgtagttaatctactctccctcaacctccagctccagggaactgctaaaactccaggaaatgactgatctgatttctatctctaggaatttgccctttctggacgtttcatgtaattgaatagaaagaacgtagtcttttgcacctggctcctttggcttactgtaatggttttcaggttcacccacactgtcccatgtaacagtgtt

SEQ ID NO: 4978 - DNA, 661 bp, Homo sapiens
  misc_feature [331]..[331]: Chromosome 16, SNP identification no. = rs7342717
  misc_feature [331]..[331]: allele = a, in linkage disequilibrium with rs7200468, respectively
  misc_feature [331]..[331]: n is a, t, c or g
atcttgactgaatttatggagtcatgtaggcgttaccacaatttagctttagaactccatcacctcagaaatatctcatttgtagttaatctactctccctcaacctccagctccagggaactgctaaaactccaggaaatgactgatctgatttctatctctaggaatttgccctttctggacgtttcatgtaattgaatagaaagaacgtagtcttttgcacctggctcctttggcttactgtaatggttttcaggttcacccacactgtcccatgtaacagtgtttggttctttttgttgtgcggtcatgttccactgtatggatagngactacattgtgtttatccattcaccagttgatagacacttggtttatttacagggtttggtcgttacaaataatgcggatatgaacagttctgtatacgcctttggacatgtgcttttctttctcttgagtagctagaagtagaaaggctggatcatttgtaggtgaatatttaactttttaagaaacttccaaactgttttccagagtggttgaaccatgttacatttccaccagcagtctataaaagttctacttctcacatacactcaccaacatgatcagtctttttctcttttttttttttttttcagagttggggtctcactc

SEQ ID NO: 4979 - DNA, 661 bp, Homo sapiens
  misc_feature [331]..[331]: Chromosome 16, SNP identification no. = rs12325484
  misc_feature [331]..[331]: allele = c, in linkage disequilibrium with rs7200468, respectively
  misc_feature [331]..[331]: n is a, t, c or g
ggggatcttctccccttagccttccaagcagctaagactacaagtgtgtgccatcatgtccagaaaattcttttttatctttggtagacccgggctctccctctgttgcctacgttggtctcaaactcctggcctcaagcagtcctttcacctctgccttccaaagtgctggaattacaggcatgatccaccaccttgctcggcccagtcttctaaatgttagacattcttacaggtatatacgggtatatgactgtgattttaatttgcattttcctcgtgactaatgatgttgagtatctttcaacttctggttttccatgtgtgtatnttctttggtgaagtttctgctcaaatattttgcccattagaaaattttgggttgttgattttcttattgtttttattgtgatacatatacataacataaagtctatccctttaaccactttttttttttttttttgagatggagacttgctctgtcaccccggctgcagtgcagtggtgcaatcttggctcactgcaacctccacctcacaagttcaagtgattctcctgcctcagcctcccgagtagctggaattacaggcgcatgccaccgcacctggctgatttttgtatttttagtagagacggggtttcaccatcttggtgaggc

SEQ ID NO: 4980 - DNA, 661 bp, Homo sapiens
  misc_feature [331]..[331]: Chromosome 16, SNP identification no. = rs7192464
  misc_feature [331]..[331]: allele = g, in linkage disequilibrium with rs7200468, respectively
  misc_feature [331]..[331]: n is a, t, c or g
cctcagcctcccgagtagctggaattacaggcgcatgccaccgcacctggctgatttttgtatttttagtagagacggggtttcaccatcttggtgaggctggtcttgaactcctaacctgatgatccgcctatttcggcctcccaaacctttaaccattttaaaacatacaattcagtggtgttaaatgcacccacaacattgtacaaccattatggttccagaactttttcgtcacccaaacagaaaactcgtacccattaagcattcatacccattcctccccggccctcagtaaccactaatttactttggttttatgtggtctatntatacaatggaatatgattcagccataaagggaatgaagcactgattcatgccacagtatggataaaccttgtacataccatgctcactgcaagaagccaggcataaaaggtcacatattataaaattctgtttatatcaaatacccagaaaaggcaagtctcactattgagttttaagtgttctttatataacagggatcctgtatcaggtatgtgatttgcaaatagtttatctgtatcatagagttgttctgaggagctgatatatcatgctcttagcagagctactggcatcagcacgtgcttactatttgttagctattgagatt

SEQ ID NO: 4981 - DNA, 661 bp, Homo sapiens
  misc_feature [331]..[331]: Chromosome 16, SNP identification no. = rs7198171
  misc_feature [331]..[331]: allele = g, in linkage disequilibrium with rs7200468, respectively
  misc_feature [331]..[331]: n is a, t, c or g
ttggttttatgtggtctatctatacaatggaatatgattcagccataaagggaatgaagcactgattcatgccacagtatggataaaccttgtacataccatgctcactgcaagaagccaggcataaaaggtcacatattataaaattctgtttatatcaaatacccagaaaaggcaagtctcactattgagttttaagtgttctttatataacagggatcctgtatcaggtatgtgatttgcaaatagtttatctgtatcatagagttgttctgaggagctgatatatcatgctcttagcagagctactggcatcagcacgtgcttactntttgttagctattgagatttcattatttggatccagtctcactgggaattttagtgatttattctgactgtgaacttagttaaagccctttatatagaattaaacatcttcactgctgacttgggaccctggaattataatagatgaaattttaggattggcttatcgtaggtgtttaactaacttacgttattatggcaaaaaccacaattacttttgcaccgacttaatacaagaagtaacttattttaagcaattaggatagtaatggtaatagtaatagtagttattattactaatgtcagtgactaaccttccatctcgaagtta

SEQ ID NO: 4982 - DNA, 661 bp, Homo sapiens
  misc_feature [331]..[331]: Chromosome 16, SNP identification no. = rs12929047
  misc_feature [331]..[331]: allele = g, in linkage disequilibrium with rs7200468, respectively
  misc_feature [331]..[331]: n is a, t, c or g
ctcactgggaattttagtgatttattctgactgtgaacttagttaaagccctttatatagaattaaacatcttcactgctgacttgggaccctggaattataatagatgaaattttaggattggcttatcgtaggtgtttaactaacttacgttattatggcaaaaaccacaattacttttgcaccgacttaatacaagaagtaacttattttaagcaattaggatagtaatggtaatagtaatagtagttattattactaatgtcagtgactaaccttccatctcgaagttaactaacctgtaattactcttacaagatggtaccttccnctctccaaaatcctgcagagaaggtgtctcttgaggcccgcctgtgctgcccacatcccttggtctgcatccgtatgccctcctttcccagccttagctgaagtgcctttgggaaactgtatcactgttaccttgcatgctatgtcctaatgaagaagtgacaaagggattgtactctgtaaaagaatataaaaataaattcactctaatttatatgaagatctctgtttgcttcctgccttcccaaatccaagcttcaccaactttttccctcttccgaagaattatacccccagcagcgacaataataacaataaatataggctctgt

SEQ ID NO: 4983 - DNA, 661 bp, Homo sapiens
  misc_feature [331]..[331]: Chromosome 16, SNP identification no. = rs12920834
  misc_feature [331]..[331]: allele = t, in linkage disequilibrium with rs7200468, respectively
  misc_feature [331]..[331]: n is a, t, c or g
acagaggcagagagaatcatttttcttaggtgtgtgaaggtcctcaaagagtgaggtaataggtttctttattaaaaattaatcttcttgtaaaaccattgcaatacaatgcactttaataaatcaccccacgcttccgaacacatttattatcccttctcaggaaacagtggagcccagagaaattgatgctgcagagagaatggctgctggttcactaatgaactcagatgggggcaggggctgggagcctggggctgggggctgcgttaggtttgaaatccaccgggtggtgtggattttgcatgggtattacaattggttaaaatcnattaggcttggttggatcttacagcccccaggtatacaacccttgggatttctgggttgagaggggcccagtaaaaggacagcagctctggctagggctgataaggtcatgtgagcctccagttctccatgggggtgctctgggatgacgggtagcattagttccaatttgcaaacagggagtcagcattaacccccagtggctccttaaagatgctcctcatccttcatctctgctacatccttaggcttggaggcactgggatttcagaagcaggcggaataccttctccccttggctacctattccttcaagctctcttcctccctc

SEQ ID NO: 4984 - DNA, 661 bp, Homo sapiens
  misc_feature [331]..[331]: Chromosome 16, SNP identification no. = rs7193758
  misc_feature [331]..[331]: allele = c, in linkage disequilibrium with rs7200468, respectively
  misc_feature [331]..[331]: n is a, t, c or g
tgcaatacaatgcactttaataaatcaccccacgcttccgaacacatttattatcccttctcaggaaacagtggagcccagagaaattgatgctgcagagagaatggctgctggttcactaatgaactcagatgggggcaggggctgggagcctggggctgggggctgcgttaggtttgaaatccaccgggtggtgtggattttgcatgggtattacaattggttaaaatccattaggcttggttggatcttacagcccccaggtatacaacccttgggatttctgggttgagaggggcccagtaaaaggacagcagctctggctagggcngataaggtcatgtgagcctccagttctccatgggggtgctctgggatgacgggtagcattagttccaatttgcaaacagggagtcagcattaacccccagtggctccttaaagatgctcctcatccttcatctctgctacatccttaggcttggaggcactgggatttcagaagcaggcggaataccttctccccttggctacctattccttcaagctctcttcctccctcatctaggaagattctctaactgccagtacccgtcaattacaaaaccttccaggtactttggattcttactgtctgaagcagcacctctctacagaagtg

SEQ ID NO: 4985 - DNA, 661 bp, Homo sapiens
  misc_feature [331]..[331]: Chromosome 16, SNP identification no. = rs7187057
  misc_feature [331]..[331]: allele = c, in linkage disequilibrium with rs7200468, respectively
  misc_feature [331]..[331]: n is a, t, c or g
aaattgatgctgcagagagaatggctgctggttcactaatgaactcagatgggggcaggggctgggagcctggggctgggggctgcgttaggtttgaaatccaccgggtggtgtggattttgcatgggtattacaattggttaaaatccattaggcttggttggatcttacagcccccaggtatacaacccttgggatttctgggttgagaggggcccagtaaaaggacagcagctctggctagggctgataaggtcatgtgagcctccagttctccatgggggtgctctgggatgacgggtagcattagttccaatttgcaaacagggantcagcattaacccccagtggctccttaaagatgctcctcatccttcatctctgctacatccttaggcttggaggcactgggatttcagaagcaggcggaataccttctccccttggctacctattccttcaagctctcttcctccctcatctaggaagattctctaactgccagtacccgtcaattacaaaaccttccaggtactttggattcttactgtctgaagcagcacctctctacagaagtgacaaaaccgtcttctctccttgaccaaggatgacactgactgccaaaaccatgccagctgaaccccaaattccatagcctctc

SEQ ID NO: 4986 - DNA, 661 bp, Homo sapiens
  misc_feature [331]..[331]: Chromosome 16, SNP identification no. = rs7189118
  misc_feature [331]..[331]: allele = g, in linkage disequilibrium with rs7200468, respectively
  misc_feature [331]..[331]: n is a, t, c or g
tgcagagagaatggctgctggttcactaatgaactcagatgggggcaggggctgggagcctggggctgggggctgcgttaggtttgaaatccaccgggtggtgtggattttgcatgggtattacaattggttaaaatccattaggcttggttggatcttacagcccccaggtatacaacccttgggatttctgggttgagaggggcccagtaaaaggacagcagctctggctagggctgataaggtcatgtgagcctccagttctccatgggggtgctctgggatgacgggtagcattagttccaatttgcaaacagggagtcagcattancccccagtggctccttaaagatgctcctcatccttcatctctgctacatccttaggcttggaggcactgggatttcagaagcaggcggaataccttctccccttggctacctattccttcaagctctcttcctccctcatctaggaagattctctaactgccagtacccgtcaattacaaaaccttccaggtactttggattcttactgtctgaagcagcacctctctacagaagtgacaaaaccgtcttctctccttgaccaaggatgacactgactgccaaaaccatgccagctgaaccccaaattccatagcctctcatgaaactag

SEQ ID NO: 4987 - DNA, 661 bp, Homo sapiens
  misc_feature [331]..[331]: Chromosome 16, SNP identification no. = rs1865820
  misc_feature [331]..[331]: allele = g, in linkage disequilibrium with rs7200468, respectively
  misc_feature [331]..[331]: n is a, t, c or g
ttacaattggttaaaatccattaggcttggttggatcttacagcccccaggtatacaacccttgggatttctgggttgagaggggcccagtaaaaggacagcagctctggctagggctgataaggtcatgtgagcctccagttctccatgggggtgctctgggatgacgggtagcattagttccaatttgcaaacagggagtcagcattaacccccagtggctccttaaagatgctcctcatccttcatctctgctacatccttaggcttggaggcactgggatttcagaagcaggcggaataccttctccccttggctacctattccttnaagctctcttcctccctcatctaggaagattctctaactgccagtacccgtcaattacaaaaccttccaggtactttggattcttactgtctgaagcagcacctctctacagaagtgacaaaaccgtcttctctccttgaccaaggatgacactgactgccaaaaccatgccagctgaaccccaaattccatagcctctcatgaaactagaccttgcatctcctatctgaagctcctttctcaattattatgcctggccaggcatggatcatgcttgtaatcccagtactttgggaggttgagcccaggactttgagaccagcctgggca

SEQ ID NO: 4988 - DNA, 661 bp, Homo sapiens
  misc_feature [331]..[331]: Chromosome 16, SNP identification no. = rs1865821
  misc_feature [331]..[331]: allele = g, in linkage disequilibrium with rs7200468, respectively
  misc_feature [331]..[331]: n is a, t, c or g
taaaaggacagcagctctggctagggctgataaggtcatgtgagcctccagttctccatgggggtgctctgggatgacgggtagcattagttccaatttgcaaacagggagtcagcattaacccccagtggctccttaaagatgctcctcatccttcatctctgctacatccttaggcttggaggcactgggatttcagaagcaggcggaataccttctccccttggctacctattccttcaagctctcttcctccctcatctaggaagattctctaactgccagtacccgtcaattacaaaaccttccaggtactttggattcttactgnctgaagcagcacctctctacagaagtgacaaaaccgtcttctctccttgaccaaggatgacactgactgccaaaaccatgccagctgaaccccaaattccatagcctctcatgaaactagaccttgcatctcctatctgaagctcctttctcaattattatgcctggccaggcatggatcatgcttgtaatcccagtactttgggaggttgagcccaggactttgagaccagcctgggcaacatagttaaacttcgtttctataaaaaaatacaaaattagccagatgtcatggattgtgcctatagtcccaactactagggaggctgag

SEQ ID NO: 4989 - DNA, 661 bp, Homo sapiens
  misc_feature [331]..[331]: Chromosome 16, SNP identification no. = rs7189684
  misc_feature [331]..[331]: allele = g, in linkage disequilibrium with rs7200468, respectively
  misc_feature [331]..[331]: n is a, t, c or g
aaacagggagtcagcattaacccccagtggctccttaaagatgctcctcatccttcatctctgctacatccttaggcttggaggcactgggatttcagaagcaggcggaataccttctccccttggctacctattccttcaagctctcttcctccctcatctaggaagattctctaactgccagtacccgtcaattacaaaaccttccaggtactttggattcttactgtctgaagcagcacctctctacagaagtgacaaaaccgtcttctctccttgaccaaggatgacactgactgccaaaaccatgccagctgaaccccaaattccntagcctctcatgaaactagaccttgcatctcctatctgaagctcctttctcaattattatgcctggccaggcatggatcatgcttgtaatcccagtactttgggaggttgagcccaggactttgagaccagcctgggcaacatagttaaacttcgtttctataaaaaaatacaaaattagccagatgtcatggattgtgcctatagtcccaactactagggaggctgaggtgggaggattgtttgagcctgggaggctgaggctgcaatgagccatgatcgtcccactgtactctagcctgggtaacagtgagacccctgtctcaaaaaa

SEQ ID NO: 4990 - DNA, 661 bp, Homo sapiens
  misc_feature [331]..[331]: Chromosome 16, SNP identification no. = rs7195375
  misc_feature [331]..[331]: allele = t, in linkage disequilibrium with rs7200468, respectively
  misc_feature [331]..[331]: n is a, t, c or g
cagaaaaatcagacatatcccattttgggttcagctgaggatatcccctttcctgtacatcttccctgcattgtaatccaattcagcgtcgtcttgcactcttgtgcactctctctctatctctctgtgtgtgtgtgtttgtgtgtgtgttggggtgtgcacttctaggagcagccatgtttctattacggtaattaaacacaggtgaaggatagcttggagctttgaaatccatattcttctccccagttcccctcacatttcttcttaaagcgagcttgctgacaagcaggtactgatggataacggaactctcactgatatcccattngtggttggagtttcaggtagttgcatttttacagtgcttggcacagtgtaggtaataaataaatgtcttttcaatgagtaagagagtgagaaattaatggatgaacaagtgagtgaggccaaaattctcatagctcagggaacaggagaaagtctgactaatgtttgggaagatggcatgacaccaagacccttagtgggagaagcccagctggagaggggagagagaaaggagaggggagagagaaaggggttcatgaagatggggctggagatgccgacagggtgcctgcagtgatgggtcttgtgggctgtattttttttttttttt

SEQ ID NO: 4991 - DNA, 661 bp, Homo sapiens
  misc_feature [331]..[331]: Chromosome 16, SNP identification no. = rs11648254
  misc_feature [331]..[331]: allele = t, in linkage disequilibrium with rs7200468, respectively
  misc_feature [331]..[331]: n is a, t, c or g
taacggaactctcactgatatcccattcgtggttggagtttcaggtagttgcatttttacagtgcttggcacagtgtaggtaataaataaatgtcttttcaatgagtaagagagtgagaaattaatggatgaacaagtgagtgaggccaaaattctcatagctcagggaacaggagaaagtctgactaatgtttgggaagatggcatgacaccaagacccttagtgggagaagcccagctggagaggggagagagaaaggagaggggagagagaaaggggttcatgaagatggggctggagatgccgacagggtgcctgcagtgatgggtnttgtgggctgtatttttttttttttttgagacggagtcttgctgtcacccaggctggagtacagtggcgcagtctgggctcactgcagctccgactcccgggttcgcgccattctcctgcctcagcctcagtagctgggactacaggcacccaccaccatgcccggctaattttttgtatttttagtagagttggggattcaccgtgttagccaggatggtctcgatctcctgacctcatgttctacccacctcggcctccaaaagtgctgggattacgggcgtgagccaccgcgcctggccaggtcttgtgggctgtattaagcgtatt

SEQ ID NO: 4992 - DNA, 661 bp, Homo sapiens
  misc_feature [331]..[331]: Chromosome 16, SNP identification no. = rs6500727
  misc_feature [331]..[331]: allele = g, in linkage disequilibrium with rs7200468, respectively
  misc_feature [331]..[331]: n is a, t, c or g
ccacctcggcctccaaaagtgctgggattacgggcgtgagccaccgcgcctggccaggtcttgtgggctgtattaagcgtatttgtctttatggtgaaagcagtagggtctttgaacagttttaagcaggagacaggtaaataaagatattcaataactttatccccattctgatcactagtaatgatacttcattagatcatcaccatccttagcattgttaccaatcattgagcagttgctgagccaggctgtgtgttaggaggtttctgtatctgactcaatggtgcctccaggcattgtgtaccgtcatcagttttgcatatgaggnaatggactgacagggtgaagaccattaccccggcaggaaagcctgagtttcattgcacatcatgccttgcaagggcttgtatatcatggggttctcgcactccccatatgaggggataccattgtgtcctatttcctgctcttgggtcgtggagaggtctataaggaacagagagctctgcctttctttactcagtcaataagttttttgagcaccagccatgtgccagatactgtgctaggctcaccttctgaaatccgtctcggaagacacaaggaacctctgaattggagatggtctaagtccattaataagcattttttgaacaat

SEQ ID NO: 4993 - DNA, 661 bp, Homo sapiens
  misc_feature [331]..[331]: Chromosome 16, SNP identification no. = rs2342743
  misc_feature [331]..[331]: allele = g, in linkage disequilibrium with rs7200468, respectively
  misc_feature [331]..[331]: n is a, t, c or g
tcatcaccatccttagcattgttaccaatcattgagcagttgctgagccaggctgtgtgttaggaggtttctgtatctgactcaatggtgcctccaggcattgtgtaccgtcatcagttttgcatatgaggcaatggactgacagggtgaagaccattaccccggcaggaaagcctgagtttcattgcacatcatgccttgcaagggcttgtatatcatggggttctcgcactccccatatgaggggataccattgtgtcctatttcctgctcttgggtcgtggagaggtctataaggaacagagagctctgcctttctttactcagtcantaagttttttgagcaccagccatgtgccagatactgtgctaggctcaccttctgaaatccgtctcggaagacacaaggaacctctgaattggagatggtctaagtccattaataagcattttttgaacaatatttactttgttagttttgacgagaaattagaagaattagataggacccttgttttcaaaaagttgtcagcatgggaggaagaaaacagagagtcttgaccgtagaggggacaacaaagaatgagcttcaaggtatgattaggagtgttgctggttactgctgcctgcagctaatgtctcccctgagcattggatccct

SEQ ID NO: 4994 - DNA, 661 bp, Homo sapiens
  misc_feature [331]..[331]: Chromosome 16, SNP identification no. = rs2342745
  misc_feature [331]..[331]: allele = c, in linkage disequilibrium with rs7200468, respectively
  misc_feature [331]..[331]: n is a, t, c or g
gttaggaggtttctgtatctgactcaatggtgcctccaggcattgtgtaccgtcatcagttttgcatatgaggcaatggactgacagggtgaagaccattaccccggcaggaaagcctgagtttcattgcacatcatgccttgcaagggcttgtatatcatggggttctcgcactccccatatgaggggataccattgtgtcctatttcctgctcttgggtcgtggagaggtctataaggaacagagagctctgcctttctttactcagtcaataagttttttgagcaccagccatgtgccagatactgtgctaggctcaccttctgaaanccgtctcggaagacacaaggaacctctgaattggagatggtctaagtccattaataagcattttttgaacaatatttactttgttagttttgacgagaaattagaagaattagataggacccttgttttcaaaaagttgtcagcatgggaggaagaaaacagagagtcttgaccgtagaggggacaacaaagaatgagcttcaaggtatgattaggagtgttgctggttactgctgcctgcagctaatgtctcccctgagcattggatccctgtgtccattatgttctatgcatacctcatgctcaaaggggctacagtgggagagagga

SEQ ID NO: 4995 - DNA, 661 bp, Homo sapiens
  misc_feature [331]..[331]: Chromosome 16, SNP identification no. = rs2342747
  misc_feature [331]..[331]: allele = g, in linkage disequilibrium with rs7200468, respectively
  misc_feature [331]..[331]: n is a, t, c or g
ccatatgaggggataccattgtgtcctatttcctgctcttgggtcgtggagaggtctataaggaacagagagctctgcctttctttactcagtcaataagttttttgagcaccagccatgtgccagatactgtgctaggctcaccttctgaaatccgtctcggaagacacaaggaacctctgaattggagatggtctaagtccattaataagcattttttgaacaatatttactttgttagttttgacgagaaattagaagaattagataggacccttgttttcaaaaagttgtcagcatgggaggaagaaaacagagagtcttgaccgtngaggggacaacaaagaatgagcttcaaggtatgattaggagtgttgctggttactgctgcctgcagctaatgtctcccctgagcattggatccctgtgtccattatgttctatgcatacctcatgctcaaaggggctacagtgggagagaggactccttttatgtcccatagtctgtgtaaatggttcctccacccaccaaatacatcacctttgactcatctctttcccttgttccatccttacaatggatgggtcttaattacctcttggatctgtccccatctccatctgtccttctcctcctctgctccatttccccctccttgtc

SEQ ID NO: 4996 - DNA, 661 bp, Homo sapiens
  misc_feature [331]..[331]: Chromosome 16, SNP identification no. = rs2342748
  misc_feature [331]..[331]: allele = c, in linkage disequilibrium with rs7200468, respectively
  misc_feature [331]..[331]: n is a, t, c or g
ttcctgctcttgggtcgtggagaggtctataaggaacagagagctctgcctttctttactcagtcaataagttttttgagcaccagccatgtgccagatactgtgctaggctcaccttctgaaatccgtctcggaagacacaaggaacctctgaattggagatggtctaagtccattaataagcattttttgaacaatatttactttgttagttttgacgagaaattagaagaattagataggacccttgttttcaaaaagttgtcagcatgggaggaagaaaacagagagtcttgaccgtagaggggacaacaaagaatgagcttcaagntatgattaggagtgttgctggttactgctgcctgcagctaatgtctcccctgagcattggatccctgtgtccattatgttctatgcatacctcatgctcaaaggggctacagtgggagagaggactccttttatgtcccatagtctgtgtaaatggttcctccacccaccaaatacatcacctttgactcatctctttcccttgttccatccttacaatggatgggtcttaattacctcttggatctgtccccatctccatctgtccttctcctcctctgctccatttccccctccttgtctctgctttctctccatccacaggtctgtt

SEQ ID NO: 4997 - DNA, 661 bp, Homo sapiens
  misc_feature [331]..[331]: Chromosome 16, SNP identification no. = rs1550136
  misc_feature [331]..[331]: allele = c, in linkage disequilibrium with rs7200468, respectively
  misc_feature [331]..[331]: n is a, t, c or g
ggtatgattaggagtgttgctggttactgctgcctgcagctaatgtctcccctgagcattggatccctgtgtccattatgttctatgcatacctcatgctcaaaggggctacagtgggagagaggactccttttatgtcccatagtctgtgtaaatggttcctccacccaccaaatacatcacctttgactcatctctttcccttgttccatccttacaatggatgggtcttaattacctcttggatctgtccccatctccatctgtccttctcctcctctgctccatttccccctccttgtctctgctttctctccatccacaggtctgntctcctgccctggtatcatattctgtttgagccactataacaaaacaccacagactgggtggcttatacacaacagaaatgtataggtcacggttctggaggctgggaagtgcaaatcaaggtgtcagcagcttcagtgtctgctaagggcccacttcctagatggccgtcttttcaatgtgacatcctatgacaaaggatcatacgagctctctgggatctcttttataagggccctaatcccattcatgaaggcttatgcctgtgacctgaccacctcccaaggggcctcacctcttttaggggacacaattatttagaccacagcac

SEQ ID NO: 4998 - DNA, 661 bp, Homo sapiens
  misc_feature [331]..[331]: Chromosome 16, SNP identification no. = rs7200468
  misc_feature [331]..[331]: allele = c, g
  misc_feature [331]..[331]: n is a, t, c or g
taagggccctaatcccattcatgaaggcttatgcctgtgacctgaccacctcccaaggggcctcacctcttttaggggacacaattatttagaccacagcacctgggaggttagcaatatcttcctatggtgcctctctgcttccatctatgctctgcttctgctctagagtggtctttcaaaagcatgacctcactgtgccacttctatgaaaccctacagaggtttcactttgcttgcaggaagcagtgcaaactgtattttggaacacaggttctttctgacctgggtccttatcttctgccatttacctcttggaagacttacgttntactgacgctggactacttgacatttcctatccaagttgtgtctccaggcccttatctatgctgctcccactgcctggaataccctttccctctgccatgcccaccaggtgaatcacagcttatcctttaagacatggctttagtttctttcaacaaatattattgagcactttctttacatgctagatcatgccctaggcaggccctggagccccagaaatgatggataaatgaggagctagctttgtacctcaagtgccctgtcactttttcattcatcactcacctccgttagagagggttggcctttctgctggcctttatcgtcg

SEQ ID NO: 4999 - DNA, 661 bp, Homo sapiens
  misc_feature [331]..[331]: Chromosome 16, SNP identification no. = rs7201911
  misc_feature [331]..[331]: allele = g, in linkage disequilibrium with rs7200468, respectively
  misc_feature [331]..[331]: n is a, t, c or g
cctgtgacctgaccacctcccaaggggcctcacctcttttaggggacacaattatttagaccacagcacctgggaggttagcaatatcttcctatggtgcctctctgcttccatctatgctctgcttctgctctagagtggtctttcaaaagcatgacctcactgtgccacttctatgaaaccctacagaggtttcactttgcttgcaggaagcagtgcaaactgtattttggaacacaggttctttctgacctgggtccttatcttctgccatttacctcttggaagacttacgttgtactgacgctggactacttgacatttcctatcnaagttgtgtctccaggcccttatctatgctgctcccactgcctggaataccctttccctctgccatgcccaccaggtgaatcacagcttatcctttaagacatggctttagtttctttcaacaaatattattgagcactttctttacatgctagatcatgccctaggcaggccctggagccccagaaatgatggataaatgaggagctagctttgtacctcaagtgccctgtcactttttcattcatcactcacctccgttagagagggttggcctttctgctggcctttatcgtcgcatcccactctgttgaggtaccttgcttacaag

SEQ ID NO: 5000 - DNA, 661 bp, Homo sapiens
  misc_feature [331]..[331]: Chromosome 16, SNP identification no. = rs1550137
  misc_feature [331]..[331]: allele = c, in linkage disequilibrium with rs7200468, respectively
  misc_feature [331]..[331]: n is a, t, c or g
ccacctctaggaagtggttgttgctgtcattcccattttatagatggaggaagcagagctcatggggattaaaacacttgcccctggtccatactcaccccatagcctgactgcaaagttcattctcttaaccgccatgctacattgtcttattcagttctttgtcttcggcacatcacgtggaatagggcacagagacgtttgctaaaggaatcttactgtctttatataaatcctgcaaggggggaggcaggaacagatgacattggagaagaggtggggtgaggaaggaccatcccggtgaccccggccacgtggctggaccgtgccnggattgatcagcattagcagcaccagagctgcagctgcccgcacgtttctagccacaagggaggggaacccaccccagcttcttttcatcatcagcctaactaatttcttcccccacctgcttttgtgtttttgcttggcggttgtcagagggcacctgaaaatgagcttggtgagaaggaacgttttccccatgaatcagctctgaaatcattcctctgaagtgcgtcacagcgttaccctgaattgttgggacgcgactccagcagcgtcctgagtgacaccgttcccccgtctgtctcctgtgctctcccagcctcacaggggttta

SEQ ID NO: 5001 - DNA, 661 bp, Homo sapiens
  misc_feature [331]..[331]: Chromosome 16, SNP identification no. = rs2343252
  misc_feature [331]..[331]: allele = c, in linkage disequilibrium with rs7200468, respectively
  misc_feature [331]..[331]: n is a, t, c or g
agctatgaggatgcaaaggcataagaatgatacaatagactttggggacttggggggaatagggagaggggcaagggataaaagacaacaaatatggtgcagtgtttactgcttgggtggtgggtgtggcaggttctcacaaatctccactaaataacttactcatgtaaccaaataccacctgtaccccaatagcttatggaaaaataaaattaataaatacaaataaaaaataaaaagttatttataattgagtgggttctcactaataatagtaataaataagttctggagatctactctatagcatagatcctatagctacaaatantatattgtgcacttaaaattttccaaccacaaagaaatggtgggcaagaattgaggtgataggtacatttaaaatacacaatgctgctacaagaattacggaattatgtcttgtgtctgtggaattatgtcttcttgggtttccaacccatggcctggagagtccatcctgggctcctggagtgtgcaagttggaaggaattggagatggtttgttgtcatggttaagtgcatggactttggaacctagctgcccaggtttaagttccagctctgccatgcacatctttgggaccttgagtgtgttgcttaaaatgcatctgaaaggcat

SEQ ID NO: 5002 - DNA, 661 bp, Homo sapiens
  misc_feature [331]..[331]: Chromosome 16, SNP identification no. = rs9930544
  misc_feature [331]..[331]: allele = c, in linkage disequilibrium with rs7200468, respectively
  misc_feature [331]..[331]: n is a, t, c or g
tcttagcgtattaaacccttctgcctacccattgccttaccctgaggatcctggaggactgtgagagtcctgggcacatagagggcagtcggatactgacgcagtgagtggatgaacacccattcactttgctattctagcataagtccttacacatagttggtacttgataactattttggaagtgagattagaggttgagtatgtgaacagataaataactgaataccagatggcaagtacataaaggaaggggtagctcctgcctcttggaactaatgagctggcagagtcgtaaccaaatgcaacatagcatgtgaagtgttctatngagggaatagtcgatattgcttattgagaatataatatgtgtcaggcactgccctctatggctggggtccccaaaccccaggccacggactgctaccagtccatggcctattaggaacccaaccacacagaaggaggtgagttgcaggcaagtaagtgaagcttcatctttatttacagccactccccatcactcacattatcacctgagctccacctccagtcaggtcagtggcagcattagattatcataggagtgcaaatcctattgtgaactgcacatgtgagggatctaggttgcatgctccttatgagaatttaatgcccgatg

SEQ ID NO: 5003 - DNA, 661 bp, Homo sapiens
  misc_feature [331]..[331]: Chromosome 16, SNP identification no. = rs4296263
  misc_feature [331]..[331]: allele = g, in linkage disequilibrium with rs7200468, respectively
  misc_feature [331]..[331]: n is a, t, c or g
tggtggccctcttctacctcctccaacatccccctccatcccctccttttctttctctcttcagtaacagcccctgctcatgatctcccatgggctgtgtagatctgctgtccatgagccaggcattgacgcaagagaacaaaggcattgctaatgctgtaaatcctggatccaatttatttgttatttccactcatttgaaatgcacctgttgccccaaaggcctttgaatgccatcagcagcaactacagaatcaaagagaaattagaaccttttggaaaagccctcagtcattcagaagggaaacaaaaacaggggggaagaaaaggnctttggtttttttttccccttaggtgacttactggcatagacggttgggcttctgaaagacccttaggagcaaggatctgaggctgttttctttttccttcctcttgcttccagtctcttcgtttgctcaatacattcaaatagccatgacatttccttgtagggtttttaaaacaccacactgccacttttcttcaggctaggattgtctagcatccatcttgtgggctgcaatgctcatttgcaaatcgtcctggatacattggcagctcagggtctgatattacccagctaatccagtgttttgttagagaccatttgccccgcagt

SEQ ID NO: 5004 - DNA, 661 bp, Homo sapiens
  misc_feature [331]..[331]: Chromosome 16, SNP identification no. = rs2118014
  misc_feature [331]..[331]: allele = a, in linkage disequilibrium with rs7200468, respectively
  misc_feature [331]..[331]: n is a, t, c or g
atatatcctattctggctcccatccagttaggatgctgcagatgagccgggaacgggaaacttgctatctcatgtgcttagatgactgtttggctgcccgtcctctttggttgttagatcaagggtgataaattctgtctttcttccaatgatactttgggacatccatgttagcctgttttttcatctttggggcccagcagtcactttctctctctagacctctgttttcttatctgcaaagtgggaatttggatggatgaatatcttcattgctttcagttctaatattggtgacagctcagtcacaaagcaagcgcaaaaaaatctntctctgcaaacagtagttgttacagttaacgtgaactaagcactttttgcagactacctcagtgagctctcacaccattttacaaatcaggaaagagaaacccagagggtagtttccttgctcaagatgactttgagaggtgtgcttctcagctggaggaaaagtttgcaccccagaggacatttggcaatatctgaaagtatttttggtttcacagctcgctggggagtgctcctggcatatagagtagaggccagggatattgataaaccacctccaaagcacaggagaacacctacagcaaagaattatctggtcccaaatttcaac

SEQ ID NO: 5005 - DNA, 661 bp, Homo sapiens
  misc_feature [331]..[331]: Chromosome 16, SNP identification no. = rs7200548
  misc_feature [331]..[331]: allele = g, in linkage disequilibrium with rs7200468, respectively
  misc_feature [331]..[331]: n is a, t, c or g
atcttgcttcccctatgtcctgacagcgctgtccttggttgaaccagaggcagaacatctgcatggcagtgaatcacacagctcttctgaagaggctggaaaaacaaagccacacccagagaggccaccccctgtccccagcgtctgagggcgcatgagatgaggtgaggctgtgtgccccagaggatgctgtgctctgcggggtagaaagtcattttgtgctgataggcctggcggtgacctggctctacacctctcctgtgccttcagaacaccaggaacacagctcccccactgccatcatgatctttacataaacactgagctctanaagaagaggcttaaatgggggaaggagttgctgggatgagagtatgggcttcacagaatgaaaacatgtcaaaaggggaggattagggttacttagaagtgaggccgtgggtcaccactgcttggagatgtgtgtaggtgaagcagaaggagccttctcacagcacactggctttagcatggcctgtgtgatccacctggggatgcagtgagttccctatcatggaaaacacacagacaaaacctaggggaaccactctcagtgttgccgagagccagtgcctgtctgggtgagagcttggactgccagaagcttcctgccaacaaggtc

SEQ ID NO: 5006 - DNA, 661 bp, Homo sapiens
  FTO
  misc_feature [331]..[331]: Chromosome 16, SNP identification no. = rs8061228
  misc_feature [331]..[331]: allele = c, in linkage disequilibrium with rs10521306, respectively
  misc_feature [331]..[331]: n is a, t, c or g
tttttttaaaaagtcaaaagtaaaagcaaccatggtctaatgctgccttttctctttacttttaaatccaaatagcacaaggagccccgtagagggagggacttcggccccgtgctgatatctgaaatctgaacttcatagcacttatgaaaaggaaacagtttagctcaatttataataatatattggtctgcagaggaagtgcaggctgaaccctgctgtctcaagtaaatactccaggggtgtctgatggggaacgtgtcgggtgcctgtaataaatccactgcccatggaagtgagtgaaggccttgttggcagtgcctgaggacangcttaactaaggttgtcacggttttacttttaaattggaatctttgccctaatctcagagttagacatgaccagatttgcaaacagatttacaattttcactaattttccaaccaggacttcaaaacacactcagagaaaaaaaaatacactctggtctttctcagagtaggatgatttactttgccacagatgttttccatagactgaatgtaaccagggagttagggacttaaaagtggcttggagacaaaccatgggtttgttttttgtggaacagattatacagttcaagggacatcaacacaattatgtttattaaccaggagct

SEQ ID NO: 5007 - DNA, 661 bp, Homo sapiens
  FTO
  misc_feature [331]..[331]: Chromosome 16, SNP identification no. = rs12448529
  misc_feature [331]..[331]: allele = t, in linkage disequilibrium with rs10521306, respectively
  misc_feature [331]..[331]: n is a, t, c or g
cccatggaagtgagtgaaggccttgttggcagtgcctgaggacatgcttaactaaggttgtcacggttttacttttaaattggaatctttgccctaatctcagagttagacatgaccagatttgcaaacagatttacaattttcactaattttccaaccaggacttcaaaacacactcagagaaaaaaaaatacactctggtctttctcagagtaggatgatttactttgccacagatgttttccatagactgaatgtaaccagggagttagggacttaaaagtggcttggagacaaaccatgggtttgttttttgtggaacagattatanagttcaagggacatcaacacaattatgtttattaaccaggagctgggtgtggaggtgggatgtttcaggacaaaggtgagtgctaggtaaacatttggggcaaaaaccctctcttcctcccttaatttgttattgttattctttacatgtcaccattcatgactctgttctctctgctctatttacatttgtttcttaagcacaactaaatctcactttcaagtatttgttgttactataccaatcagcagtttcaaaacttaagttgccaggtaaaaattccactgcaaaaaaagaaaactgcaatagaaatgtaaatgcatagccctt

SEQ ID NO: 5008 - DNA, 661 bp, Homo sapiens
  FTO
  misc_feature [331]..[331]: Chromosome 16, SNP identification no. = rs11075999
  misc_feature [331]..[331]: allele = c, in linkage disequilibrium with rs10521306, respectively
  misc_feature [331]..[331]: n is a, t, c or g
ctttctcagagtaggatgatttactttgccacagatgttttccatagactgaatgtaaccagggagttagggacttaaaagtggcttggagacaaaccatgggtttgttttttgtggaacagattatacagttcaagggacatcaacacaattatgtttattaaccaggagctgggtgtggaggtgggatgtttcaggacaaaggtgagtgctaggtaaacatttggggcaaaaaccctctcttcctcccttaatttgttattgttattctttacatgtcaccattcatgactctgttctctctgctctatttacatttgtttcttaagcncaactaaatctcactttcaagtatttgttgttactataccaatcagcagtttcaaaacttaagttgccaggtaaaaattccactgcaaaaaaagaaaactgcaatagaaatgtaaatgcatagcccttcttttttggtttttctttaccttgtcaacagtttagggtagagttgtgaaaggaccataggatttctatcaggtaaccaggtcccagactcaccgcattgtcaattgcctgtgtattgctagtgcctctcttagtctctgccttcactgtaaaatgggagcttaatgatacttccttctcagagtttttgggagtacaaata

SEQ ID NO: 5009 - DNA, 661 bp, Homo sapiens
  FTO
  misc_feature [331]..[331]: Chromosome 16, SNP identification no. = rs1344500
  misc_feature [331]..[331]: allele = c, in linkage disequilibrium with rs10521306, respectively
  misc_feature [331]..[331]: n is a, t, c or g
tttgtgaaggtgacaaaactctgggcatgaagcaggatacgaacacagcattcagcattcttctatcacccagtcgtctcactggttctccaatatgccatggtccagttcccactcttcacaagtctgcacttacaaattatagcttgcaaagcctattcccatacattttcttatttgtactcccaaaaactctgagaaggaagtatcattaagctcccattttacagtgaaggcagagactaagagaggcactagcaatacacaggcaattgacaatgcggtgagtctgggacctggttacctgatagaaatcctatggtcctttcanaactctaccctaaactgttgacaaggtaaagaaaaaccaaaaaagaagggctatgcatttacatttctattgcagttttctttttttgcagtggaatttttacctggcaacttaagttttgaaactgctgattggtatagtaacaacaaatacttgaaagtgagatttagttgtgcttaagaaacaaatgtaaatagagcagagagaacagagtcatgaatggtgacatgtaaagaataacaataacaaattaagggaggaagagagggtttttgccccaaatgtttacctagcactcacctttgtcctgaaacatcccacctccacacc

SEQ ID NO: 5010 - DNA, 661 bp, Homo sapiens
  FTO
  misc_feature [331]..[331]: Chromosome 16, SNP identification no. = rs2111114
  misc_feature [331]..[331]: allele = c, in linkage disequilibrium with rs10521306, respectively
  misc_feature [331]..[331]: n is a, t, c or g
tacaaagataccacagtttccatgttcagtcccaagggagcccccgcttaagagtctaaactcctggagacctctgttcttcctgctcacagggctacagactccagtgggagtggccatgttgagtcaaaaaacagaagcatggcaatttacagtttagaccacatcaaatatttctgtgctctgggtcttgctgcctctaagccataggtatttcaaggaaggtgaacttaatctataaaaaactactggccaggctctaaaagtaaagctggcctccaccaaagtaagactgattactacagggctctgataaccaatggaccagatnttaattctcctcaccctcaagaatccattggtaaaacttccctttcttgtagttcctatatgtagcaaatatacgtatggaatggtattttgtgaaggtgacaaaactctgggcatgaagcaggatacgaacacagcattcagcattcttctatcacccagtcgtctcactggttctccaatatgccatggtccagttcccactcttcacaagtctgcacttacaaattatagcttgcaaagcctattcccatacattttcttatttgtactcccaaaaactctgagaaggaagtatcattaagctcccattttacagtgaaggcagaga

SEQ ID NO: 5011 - DNA, 661 bp, Homo sapiens
  FTO
  misc_feature [331]..[331]: Chromosome 16, SNP identification no. = rs10521306
  misc_feature [331]..[331]: allele = g, a
  misc_feature [331]..[331]: n is a, t, c or g
gagcattttcatagccttaaaagcagccctgtacccattagcaatcaatctccattaatttttttttctggaaaaaaaaagtgagtgtcagaatgagagtctactatgtaatagtcctgtaataaggaataaacaaaaatatatcaaatctgccagcacaatgcctggaccttagtaggcactcaagacatgcatttcaggtaaagttcaagacacaaatgatagagaaatgagcaaaaacctggatgtaacaaaaaagtgtaagaggtaaataaagcctttcaagtactcaggaacctgctcagatccctatccttagagtaaattccanaagtcatgaccttctccctattaaataaaaatttaaaaaaaatcagatatcaagtaaaaaagcacaagcttgaaaatgtcagtatttgggggcatattttagagtgaaagtttcaggaggagagatacatcctcatccctggaaaaaaaaaaaaattgaacacaagaagcaaacagtgcagttcctgagaagataacaagaatgccagaagttcatattggataggcagtggaaactatactgtcatgtttctacttttcaaagtgaaaataaacatgacaggtgctcatttggctgttcaagcactttccacttaaatagcaattcctc

SEQ ID NO: 5012 - DNA, 661 bp, Homo sapiens
  FTO
  misc_feature [331]..[331]: Chromosome 16, SNP identification no. = rs13337591
  misc_feature [331]..[331]: allele = t, in linkage disequilibrium with rs10521306, respectively
  misc_feature [331]..[331]: n is a, t, c or g
gaggccgaggccagagaatcccttgaacctgttaggcggtggttgcagtgagccaagatcgcaccattgcactctagcctgggtgacagagcaggactttgtctcaagaaaaaaaaatgtattttaaatttcagtagccttagggatataagcagtttttggttccatggatgatttgtatagtgttgaagtctggtattttaatgtacctgtcacctgagtagtatacatctgataagtgttttgttttttttttcatccatcacccccctcccatcctcctctcttctgaatctccagtgtccattgtaccactctctacaccttcatntgcccatagcttagtgcccacttacaagtgagaacatgcaatatttgtttgtccattcctgagttacttcacttagaataatggccttcagtttcatccacgttgctgcaaaagacatgatttcattttttttaatgactgagtagtatttcatggtatatatacatgccacattttctttatctactcaacagttgttgggcactttggttgattccatatctttgcaattgtgaaatgtgctgcaataaacatatgcgtgcagatatctttttgatataatgacttctttttcaggtagatacccagcagtggattgttgggtcaaat

SEQ ID NO: 5013 - DNA, 661 bp, Homo sapiens
  CDH3
  misc_feature [331]..[331]: Chromosome 16, SNP identification no. = rs7196626
  misc_feature [331]..[331]: allele = a, in linkage disequilibrium with rs11865026, respectively
  misc_feature [331]..[331]: n is a, t, c or g
gatttttatcctgaccagtgtgtgggtgggcagcagctccttatttggccaacatgttcaaatccagctcctctcttatagaaacagtgaagtgtctgagatccaaagccaatttgaaatggtcattcagccaacaaatgtctgagtacctactaggtactagatactcagagggtaagtaaggccacagctcctaaccctcagtgaactcctgattagagttcaggtactgtttactgtcaggtactgttctaggtgctgggaattcactagtgaacaaaatgtgcaaaaatcctggcctcaaagggccacttatctgctagtatagagngacagacaaataagtacaatatatgcatatatgagattgaggaggggctgggcatggtggctcacacctgtaatcctagcactttgggaagccgaggcaggcggatcacttgaggtcaggagttcgaaaccagcctggccaacatagtgaaaccccgtctctgctaacaacaacaacaaacaaacaaacaaaataattagcctggcatggtggcaagcacctgtaatcccagcttactcaggaggctgaggcaggagaatggcttgaacccaggaggcagaggttgcagtgagctgagattaagccactccactccagcctgggcgacag

SEQ ID NO: 5014 - DNA, 661 bp, Homo sapiens
  CDH3
  misc_feature [331]..[331]: Chromosome 16, SNP identification no. = rs1111720
  misc_feature [331]..[331]: allele = c, in linkage disequilibrium with rs11865026, respectively
  misc_feature [331]..[331]: n is a, t, c or g
gcctcagcctcccgagtagctgggactacaggcacatgccaccacacccggctaattttttgtatcttttgtagacgtgaggtttcaccatgttagccaggctggtctcaatctcctgacctcatgatctgcccgcctcagcctcccaaagtgctgggattacaggcatgagccactgtgcccagctgtgttgtgctttaaaaagcacaataaagtattaaaaaccaggggcagtgatttaaaaagcaacacagaaggacaggaaggtgaaggccattcagaatcctaagataagcagaaagtttaaaaataggatcaactgccatagagncaagcataggaaattaaatcccaaatgccatgcagctaggcacagtggctcatgcctgtaattctagcactttgggaggccaaggcgggtgggtcacttaagtccaggagtttgagaccagcctgggcaacatggcgaaaccccatctctaccaaaattagctgggagtgatagtgcatgcctgtggtcccagctacttgagaggctgaggtgggaggatcacctgagcctgggagatcaaggctgcagtgagtcgtgatcacaccatgcactccagcctgggcaacagagagagaccctgtctcaaaataataataataatatcaataa

SEQ ID NO: 5015 - DNA, 661 bp, Homo sapiens
  CDH3
  misc_feature [331]..[331]: Chromosome 16, SNP identification no. = rs3114398
  misc_feature [331]..[331]: allele = a, in linkage disequilibrium with rs11865026, respectively
  misc_feature [331]..[331]: n is a, t, c or g
ggctggttcctaagcgatcttctctttcttgtgatcacattccagccttcccacagaggatccttctgtgtgtggtaagcttttgggctctgaggcagctctttagggtccccaagcccctctgtcctctcccattcactgagtccactgcctaaaagatggccagtgtcttaacttcctttgcctggatgagttttgcctggttttgaacttcctgttagtggaatcttgcatatgtcctctcatatctggcttctactactcaaccttatgtttgttaaatttcccatgtagttgcctgtccttgtgcttcattcacttcattatgtgnatatacccagtgtttctacccattctccctcattgtttgggccgattctggcttagctattatgaatagtgctgttatgaacattataatacataggttttggcaaatgtatttttgttgggtctgtacatcacagtggactttctgggtcttagggaattaatatatcaatatgtactgccaaattgttttccaaagtgattgtcttcccatatcagacttttgtttgtgtgtgtgttaaaataggcataacataaaatgtaccatttcaaccatttttaagtaaataattcagtagcactaagtacatccacagtttgtgcaacatcg

SEQ ID NO: 5016 - DNA, 661 bp, Homo sapiens
  CDH3
  misc_feature [331]..[331]: Chromosome 16, SNP identification no. = rs3118228
  misc_feature [331]..[331]: allele = t, in linkage disequilibrium with rs11865026, respectively
  misc_feature [331]..[331]: n is a, t, c or g
atcttagcttttgcataaggaaaagaatctgtttttatatatgtatatatacgaaataggtaacatgtaaaaacatgtacaatataaataaatatgtaacacatgtaagtatagactatatataaactctggaaggaaagaaactgggaacagtggttaactgcgtgaaggggtgaagggggctttgggcaaatggaggcaaacaaggggagattatttattgtatagcttattattattttttatttttgaaccatgtggctatattagctattcaaaaattaaaacgaagtgtggccaagcaccccagatgtatcttcctggaggctcntgggattggcaggcctgcatttagagctgctttcagttggggttaacatggatgataagggaaggaagtaaaggaaggtgggagagggaatccgagggactcagtacagtgggtgattactcacaaggcagctcttggctccactggcctgacctcaggcaccactgttgggtagctgcaagcactaccccccttagatcagtgctcacacccaagctgtggacagctgaggactaacactacctcctctgaagggctgacttggctcacaatggccacagcaaccaagggctcctggccagcaatttgggcatgcacagagaacatctt

SEQ ID NO: 5017 - DNA, 661 bp, Homo sapiens
  CDH3
  misc_feature [331]..[331]: Chromosome 16, SNP identification no. = rs2296409
  misc_feature [331]..[331]: allele = a, in linkage disequilibrium with rs11865026, respectively
  misc_feature [331]..[331]: n is a, t, c or g
gggccacaggcccaaggaaccaggggcatggcatgtgaacccagcagtggccatcccagctgacgtgggtcctcactgttctgccttgggctttgtgggcagggataggagcttctgctctcagagtcagttcccagcctgggcaagtctgggtaggcagtactttccctaagggccactcacttcccggtccaggccactggagatgacgctgatggtgcctgtgctccggtgaatggtgaacatgaggtcgtgtgggtcctttggttcttggctatggatggagtaagcaaccaccccattgtaggtgtagatggcatcatcctcatcngtggctgtcacctgcatcacagaagtacctggagagaagggatgagtatcttttcctcccagttccaactccagccctgtctacttctggaactctttttttcttttcttttttttttttttttttttttttgagatgaagtctcactctatcacccaggctggagtgcaatggtgtgatctcgactcactgcaacctctgcctcctgggttcaagtgattctcctgcctcagcctcctgagtggctgggattacaagtgcccgccaccacgcccggctaattttttaatatttttagtagagataggatttcaccatgttggcccagct

SEQ ID NO: 5018 - DNA, 661 bp, Homo sapiens
  CDH3
  misc_feature [331]..[331]: Chromosome 16, SNP identification no. = rs2296408
  misc_feature [331]..[331]: allele = a, in linkage disequilibrium with rs11865026, respectively
  misc_feature [331]..[331]: n is a, t, c or g
aggaaatgagaaaacctacagaaaataccaaaagtaggcattttacagctgcctcccagccctggaggagatttaacgagattggctggcagcgggccacaggcccaaggaaccaggggcatggcatgtgaacccagcagtggccatcccagctgacgtgggtcctcactgttctgccttgggctttgtgggcagggataggagcttctgctctcagagtcagttcccagcctgggcaagtctgggtaggcagtactttccctaagggccactcacttcccggtccaggccactggagatgacgctgatggtgcctgtgctccggtgaatngtgaacatgaggtcgtgtgggtcctttggttcttggctatggatggagtaagcaaccaccccattgtaggtgtagatggcatcatcctcatccgtggctgtcacctgcatcacagaagtacctggagagaagggatgagtatcttttcctcccagttccaactccagccctgtctacttctggaactctttttttcttttcttttttttttttttttttttttttgagatgaagtctcactctatcacccaggctggagtgcaatggtgtgatctcgactcactgcaacctctgcctcctgggttcaagtgattctcctgcctcagcctc

SEQ ID NO: 5019 - DNA, 661 bp, Homo sapiens
  CDH3
  misc_feature [331]..[331]: Chromosome 16, SNP identification no. = rs1886697
  misc_feature [331]..[331]: allele = c, in linkage disequilibrium with rs11865026, respectively
  misc_feature [331]..[331]: n is a, t, c or g
agccactgggctggtacgattcctggactagcccacggtagacagtggctcctcatcctgaaggctgcagacctgactgccccaggtatagccattgtctgaggcccgaactgactcaccttcctggttgtcaggatgccctggttgctctcagggtgggtggtgatggtaaaatggtccccgtcgtcaccgcccatgataaggtaggtggcacgccacgctggtgagttgggggcgtccagatcagtgaccgtcagcctctgcacctcatggcccactgcattctcaggcacatgggcctcgtactgtcagtgtgagaagcacagcactntcagagcagagaatgactgtcctactccagaggctgagaagcctccatccaacctcaggggatccccatgcctttaccctttcctggaccacccacccactttgcggggtttcagggtatacacagcggcaggatgtccccagcagcagcctcacagctgctggcacagaccacaccaatcctgtgcctgctttccctacacgcaggggcctgatgttccagaaatctcacgggtttgcatgcccaagcccctgccacgtgtagctatctatccagctgagatcagaaaggaataaggaaggtggcaagaagggctaggtgcctgaatgg

SEQ ID NO: 5020 - DNA, 661 bp, Homo sapiens
  CDH3
  misc_feature [331]..[331]: Chromosome 16, SNP identification no. = rs2281850
  misc_feature [331]..[331]: allele = g, in linkage disequilibrium with rs11865026, respectively
  misc_feature [331]..[331]: n is a, t, c or g
atccagaatatttagaattctgatgtcatcattcagggcctcctcataccaactggcagatggcctctgggctcctaagcaggatcatatggaaaatgcacctcgcccataaacggggacctaaagcagcaggtgcaggagtcccaggagggatacatgacagagtgagaaatacctgcccccaaacccctattcagtcttcagcctcaaagagggtaggaagaagagaacctatgcaggagggatattcctatttaacaatctctatggtaatcagaacaaacgttggccatgatcacccacccaccaactgtaccagtacgtgctgctnactgagcccagctcctgagtacctgatcttttgattctccttgtcagggtcttctgcagtgtagacacacacaggctccccagtggggatgccctcctggacctcaacgactttggagggtgggacaaacacaggtgcctcattcacatcctccacgtggaccactatggtggctgtggaggttgggagcttcagcacaaaaggggcctcgttggtcacttcaacgtacagggtgtgctggtttttggcctcaaaatccaaaccctaggagagaagaggaagaaggacctggaccaccattttgagaggaggtcctgtgcaggacagttg

SEQ ID NO: 5021 - DNA, 661 bp, Homo sapiens
  CDH3
  misc_feature [331]..[331]: Chromosome 16, SNP identification no. = rs2296406
  misc_feature [331]..[331]: allele = a, in linkage disequilibrium with rs11865026, respectively
  misc_feature [331]..[331]: n is a, t, c or g
ccccacccgctaccaccactcactcaggtaccttcctcgttgacctctgccgtccagtagatgtctgagtcatctgtgagctgggcctggaaaggggaggtgtggggagacaggtccttgtccgtgatgttcagcacctggcgcacagggctttggttgcagatggtgatctgacggggctcagggactgggccatggtcattgacatcaatcagtgttagcagaagggttcccgtgccagtggtgggagggcttcctgtttgtaatgacacatatgatgagctccctgtgacccacccagtcagcctcaggggggctcctcctgtttacngcccagctctcacctctcaagaccttccatgcccttgcttccaatacatggcacatacatgccagttgagccatcattctcatttctgtccacagcagacattactaactatcatgacacagttgcagccacttcatccagacagccactataaccacaaggcgaaacctaccggctacttcagggttactccagtgtttgtcgatcagcttcagggaagcttcccttcacagccctgctgcaacctctcacctgcctgcaggtcctggttcattacatgtcaaccagaggtgacaactacgtcataacctcccatctgttatggtgtgg

SEQ ID NO: 5022 - DNA, 661 bp, Homo sapiens
  CDH3
  misc_feature [331]..[331]: Chromosome 16, SNP identification no. = rs2274240
  misc_feature [331]..[331]: allele = g, in linkage disequilibrium with rs11865026, respectively
  misc_feature [331]..[331]: n is a, t, c or g
gacagcccccagcacagggaggatgaaacctcccttccagggtccagggcaggtttcgacatggccatggcagtcgcacacagtggccctgatcaccgtcagctgctctttgttgccatggtcagacagagaaaggtgcacgtcatatgtatcctgcttcaggaacttcttcagggacaagaccactgtgtcacctggagtgaacagatcattgattagctgtgggaaccatcagtgcggggatctgagtacaccatgaagaaagtttgagaatacggcttccacatgtgggcaatgcagagaaatactccacaagcacactttggaaaanagcagtaaaagctgatctttggctaaagcaaaattcaccataatgaaaaggattattgggatagaaaaattaatttgtcattttacttttaaaaaaatcaataatcacagtatttttataacatgaagttttaaaagccatgtcatgcaggaccaataacttctttgcatcattggctgctacactgtttttttgcttcaaaaagaatattcttcctaaaagatagctaacccattttttttttaaagtaaaagcaactttattaagaaagtaaaggagggctgggcgcagtggcttatgcctgcaatcccggcactttgagaggccgaa

SEQ ID NO: 5023 - DNA, 661 bp, Homo sapiens
  CDH3
  misc_feature [331]..[331]: Chromosome 16, SNP identification no. = rs2274239
  misc_feature [331]..[331]: allele = a, in linkage disequilibrium with rs11865026, respectively
  misc_feature [331]..[331]: n is a, t, c or g
acaaaaatgagctgggcgtggtggcccacacctgtagtcccaggaacttgggaggctgagctgggaagatcatttgagcctgggaggcagaagttgcaatgagccgagatcatgccactgcattccagcctgggtgacagagtgagaccctgtcttaaaaaaaatgtttaaggagtggacgggcaatgttggtggcctcttagttccaggagttaaagctcaaggtagaatccagtctttcaactcccccatcctcagggagggggtgggggcctggtactcacacagcagagccaggacagcccccagcacagggaggatgaaacctccnttccagggtccagggcaggtttcgacatggccatggcagtcgcacacagtggccctgatcaccgtcagctgctctttgttgccatggtcagacagagaaaggtgcacgtcatatgtatcctgcttcaggaacttcttcagggacaagaccactgtgtcacctggagtgaacagatcattgattagctgtgggaaccatcagtgcggggatctgagtacaccatgaagaaagtttgagaatacggcttccacatgtgggcaatgcagagaaatactccacaagcacactttggaaaatagcagtaaaagctgatctttggctaaagcaaaa

SEQ ID NO: 5024 - DNA, 661 bp, Homo sapiens
  CDH3
  misc_feature [331]..[331]: Chromosome 16, SNP identification no. = rs6499193
  misc_feature [331]..[331]: allele = t, in linkage disequilibrium with rs11865026, respectively
  misc_feature [331]..[331]: n is a, t, c or g
ggctcacacttgtaatcccaacactttgggaggccaaggtgggtggatcacttgaggtcaggagtttgagaccaccctggccaatgtggtgaaatcctgtctctactgaaaatacaaaattagccaggcatgatggcacatgcctgtaatcccagttacttgggaggctgaggcaggagaatcacttgaacccaggagatggaggttgcagtcagccgagatcacaccattgcactccagcctgggcaacagggcgagactctgtctttagaaaaacaaaacaaaaaagaaagtaggaaattaggtcagagcagtgacaggcacagggtancatcatgtcaggcctcataggttattgtgaagactctgggtagaactgaaagttatcagaaggttttgagcagaggggtgatgtgatttgacttaagttttgcaagattcctgctgagcagactatatgggggcgaaggtggaggcagggagaccatctaggaggctgtagccataatccaggggtaaaaaggtgatgggaggctcaggctaggatggcagcattgaggtggtcagaggtggtcatgtttcaaggtagagtcccttcagattgatgtgtggaattagggtaagacccatggatgatcgcaaggctttcggcttaaggaga

SEQ ID NO: 5025 - DNA, 661 bp, Homo sapiens
  CDH3
  misc_feature [331]..[331]: Chromosome 16, SNP identification no. = rs7201437
  misc_feature [331]..[331]: allele = c, in linkage disequilibrium with rs11865026, respectively
  misc_feature [331]..[331]: n is a, t, c or g
gagtttgagaccaccctggccaatgtggtgaaatcctgtctctactgaaaatacaaaattagccaggcatgatggcacatgcctgtaatcccagttacttgggaggctgaggcaggagaatcacttgaacccaggagatggaggttgcagtcagccgagatcacaccattgcactccagcctgggcaacagggcgagactctgtctttagaaaaacaaaacaaaaaagaaagtaggaaattaggtcagagcagtgacaggcacagggtaccatcatgtcaggcctcataggttattgtgaagactctgggtagaactgaaagttatcaganggttttgagcagaggggtgatgtgatttgacttaagttttgcaagattcctgctgagcagactatatgggggcgaaggtggaggcagggagaccatctaggaggctgtagccataatccaggggtaaaaaggtgatgggaggctcaggctaggatggcagcattgaggtggtcagaggtggtcatgtttcaaggtagagtcccttcagattgatgtgtggaattagggtaagacccatggatgatcgcaaggctttcggcttaaggagaaacatggcatttccatttgccgttttgggaaggaccatgggaagagacttgccaggccagt

SEQ ID NO: 5026 - DNA, 661 bp, Homo sapiens
  CDH3
  misc_feature [331]..[331]: Chromosome 16, SNP identification no. = rs3785133
  misc_feature [331]..[331]: allele = a, in linkage disequilibrium with rs11865026, respectively
  misc_feature [331]..[331]: n is a, t, c or g
tcgggaggccaaggcagttggatcacttgagggtgggggttcaagaccagcctggccaacatggtgaaaccctgtctctactgaaaatacaaaaattagccaggcttggtggcaggcacctgtaatcccagctactggggaggctgaggcaggagaatggcttgaacctgggaggcggaggttgcagtgagccgagattgcaccagtgcactctagcctgggcgacaagagtgagactctgtctcaaaaaaaaaaaaaaaaaattccaacactgcattccacgtaagtttagattactgtaccctatgaaagttgcattatcttgttcttnaagtctgtggctaattaggggacatctggtgactaaaagagagtctcattgaaagacaacatctgctgggaggttcccatcccgacatcccgacgaaaggttttcttaaggatcagtaccaccaatctggttagactgacagcattatgggtgaggagaaggaagtcagaatcttctaggaggaggtgttataagctgagagctgacatgtgggagccatgtgtatgcatagagtctgccaggtgaggaaggagcctgtatgaaggttcttaaggggaagttgctgggggtattcaaggaacacagaggaggccaatgtgcctagacctt

SEQ ID NO: 5027 - DNA, 661 bp, Homo sapiens
  CDH3
  misc_feature [331]..[331]: Chromosome 16, SNP identification no. = rs3785134
  misc_feature [331]..[331]: allele = t, in linkage disequilibrium with rs11865026, respectively
  misc_feature [331]..[331]: n is a, t, c or g
cttgaagtctgtggctaattaggggacatctggtgactaaaagagagtctcattgaaagacaacatctgctgggaggttcccatcccgacatcccgacgaaaggttttcttaaggatcagtaccaccaatctggttagactgacagcattatgggtgaggagaaggaagtcagaatcttctaggaggaggtgttataagctgagagctgacatgtgggagccatgtgtatgcatagagtctgccaggtgaggaaggagcctgtatgaaggttcttaaggggaagttgctgggggtattcaaggaacacagaggaggccaatgtgcctagancttagtgggtagggggacttggaggcataggctgggaccaaatcttgccagccttgataaagagttgaagttttcctaggtgcaagtaaagccattgtagcatgttaagctctggctactgagtgaggacatctgcagttagaggggctctgagggcctgggggtcttggcccactgtgtggttacagagggagcactcacactccccaacccttgcagtcctcctgctggtgctgcttttgttggtgagaaagaagcggaagatcaaggagcccctcctactcccagaagatgacacccgtgacaacgtcttctactatggcgaagagg

SEQ ID NO: 5028 - DNA, 661 bp, Homo sapiens
  CDH3
  misc_feature [331]..[331]: Chromosome 16, SNP identification no. = rs3785135
  misc_feature [331]..[331]: allele = a, in linkage disequilibrium with rs11865026, respectively
  misc_feature [331]..[331]: n is a, t, c or g
aaaagagagtctcattgaaagacaacatctgctgggaggttcccatcccgacatcccgacgaaaggttttcttaaggatcagtaccaccaatctggttagactgacagcattatgggtgaggagaaggaagtcagaatcttctaggaggaggtgttataagctgagagctgacatgtgggagccatgtgtatgcatagagtctgccaggtgaggaaggagcctgtatgaaggttcttaaggggaagttgctgggggtattcaaggaacacagaggaggccaatgtgcctagaccttagtgggtagggggacttggaggcataggctgggancaaatcttgccagccttgataaagagttgaagttttcctaggtgcaagtaaagccattgtagcatgttaagctctggctactgagtgaggacatctgcagttagaggggctctgagggcctgggggtcttggcccactgtgtggttacagagggagcactcacactccccaacccttgcagtcctcctgctggtgctgcttttgttggtgagaaagaagcggaagatcaaggagcccctcctactcccagaagatgacacccgtgacaacgtcttctactatggcgaagaggggggtggcgaagaggaccaggtggggcactgggggctc

SEQ ID NO: 5029 - DNA, 661 bp, Homo sapiens
  CDH3
  misc_feature [331]..[331]: Chromosome 16, SNP identification no. = rs8060790
  misc_feature [331]..[331]: allele = g, in linkage disequilibrium with rs11865026, respectively
  misc_feature [331]..[331]: n is a, t, c or g
atcttctaggaggaggtgttataagctgagagctgacatgtgggagccatgtgtatgcatagagtctgccaggtgaggaaggagcctgtatgaaggttcttaaggggaagttgctgggggtattcaaggaacacagaggaggccaatgtgcctagaccttagtgggtagggggacttggaggcataggctgggaccaaatcttgccagccttgataaagagttgaagttttcctaggtgcaagtaaagccattgtagcatgttaagctctggctactgagtgaggacatctgcagttagaggggctctgagggcctgggggtcttggcccnctgtgtggttacagagggagcactcacactccccaacccttgcagtcctcctgctggtgctgcttttgttggtgagaaagaagcggaagatcaaggagcccctcctactcccagaagatgacacccgtgacaacgtcttctactatggcgaagaggggggtggcgaagaggaccaggtggggcactgggggctctgggattgggaggtggatgcccctaaggccactggcagggctgttgggtcaaccaactgaccaagttagctgtgttgaccaggccctggcatgaagcatgcgtcttccttttctaacatcctccagcacttctctg

SEQ ID NO: 5030 - DNA, 661 bp, Homo sapiens
  CDH3
  misc_feature [331]..[331]: Chromosome 16, SNP identification no. = rs2296404
  misc_feature [331]..[331]: allele = t, in linkage disequilibrium with rs11865026, respectively
  misc_feature [331]..[331]: n is a, t, c or g
tggccctcgactggcctgccacgcctcacctcaattataaagttgccgatttcatctgggttggctggccgaggacggtacatgggtgtcgggatgatggttggtgccacgtcattgcggagaaccacctccggcctggcctccagacctcggtggagctgggtgatgtcatagtcctgtggggaaatgcaggagagcaggtgactgaggactcctgtcccccactcccctgccacttacatctcaccccacaccccctaccctttggatactctggctcatggggaggtcttacaagacagatgatgtcacagattttggaaaaccctcntttccatcctcccttgtcctagcaaattaaacataggcttgaggttaacttggctagggccaaagagactacagcaatggaccagagaagtgctggaggatgttagaaaaggaagacgcatgcttcatgccagggcctggtcaacacagctaacttggtcagttggttgacccaacagccctgccagtggccttaggggcatccacctcccaatcccagagcccccagtgccccacctggtcctcttcgccacccccctcttcgccatagtagaagacgttgtcacgggtgtcatcttctgggagtaggaggggctccttgatcttccgc

SEQ ID NO: 5031 - DNA, 661 bp, Homo sapiens
  CDH3
  misc_feature [331]..[331]: Chromosome 16, SNP identification no. = rs11075696
  misc_feature [331]..[331]: allele = t, in linkage disequilibrium with rs11865026, respectively
  misc_feature [331]..[331]: n is a, t, c or g
ggccaacatggtaaaaccctgtctctactaaaaatacaaaaaattagctgggcgtcctggtgggcgcctgtagtcccagctactcaggaggctgaggcaggagaatcgcttgaacccaggaggtggaggttgcagtgagccgagatcacatcattgcactccagcctgggcaacaaagggagattccatctttaaaaaaaaaaaaattaggaatgatttattcatttattcaacacatatagcagttgaatactctggagccagactacctgggtttggattatagatcccaggtgattgcacctggggggcaaagtttggagcctctgcngtagaagacttcaaggattgaacgagcaggcagctaggacagtgccagcacagtggttcccgaccctgcctgcgtgttggaatcacctgggcaccttcagaaaccactgatgcctcagctcacctccaaagattgtgatataattgaactgggtgtggcctgggcttcagaatttataaaagattctccagataatttaagtttcggaactactgacctagcatgtagcgcttattagataatgatagctattgttgcgaggtgctattctaataactgctttacaggtatttactcatttactcattcatctgttcctttaaaactata

SEQ ID NO: 5032 - DNA, 661 bp, Homo sapiens
  CDH3
  misc_feature [331]..[331]: Chromosome 16, SNP identification no. = rs3118235
  misc_feature [331]..[331]: allele = g, in linkage disequilibrium with rs11865026, respectively
  misc_feature [331]..[331]: n is a, t, c or g
gtcacacactgtcctgcagggagggcagccgctgttccagaagagaccttgctggggctgtggaggggctcagccttggggtaagaggttaatggttctctctcatggagcaactgactttgcaaaggagggcaagtctcccctccctgagcccacttaggcatggaagctgaccctgagtatcccctgccattgagaggaagcttgggtgaagccagcagggtaaacagagcccactctttttgcagaactctgaaaattctaaaaaccattgaattgtaaacgttaaacaagtgaatggtatggtatgtgagttagatgccaataaacnttctatttagaaaacagttcactccccaggcacctctgggaaaagtttctttaataaaaaagttctagtacatatacacgattgtcctcacccttcatctatagcaacgcaacagggaaaataaaaaataaggggcaacctaggcacactcagtataaaaacgcagagatccatccgaatgggaggcattggggtctggaaaccagaaatgcaggacggccagtgggcccagcagctctgggctgcacttttgaagaactttctctaacgttttgaagatagcattaaaaaaaaaaattaagttgcaccaggaggcctaagaaggttcca

SEQ ID NO: 5033 - DNA, 661 bp, Homo sapiens
  misc_feature [331]..[331]: Chromosome 16, SNP identification no. = rs2902323
  misc_feature [331]..[331]: allele = c, in linkage disequilibrium with rs11865026, respectively
  misc_feature [331]..[331]: n is a, t, c or g
ctaatttttatatttttagtagagacggggtttcaccatgttggccaggctggtctcaaactcctgacctcaggtgatcctcctgccttggcttcccaaagagctgggattacaggtgtgagccacacctggccaaagctccacttttcttttctgttggacttggattctgggactttgccttttaaaagtctgggagaaaagatcacttaatagaatgagtgccaggggtgctttcaagggccagtcatccaagagtgaaccccacattcaaggaagccctgatctcaaccgggaccacgatccccatctcctgcccccgaccccaccntagaatgcaggactggctttgaagcatctgcacaagtggatgctgcaagttgtttgacattgttaagggcaaaaaattagaatgaccaatatctatggattgtggtgacattaaataacacatccaaactggatgtgttggggacagtaagtcaatatgccatgttatgaaaaggtataatgcaaagcatgtgtgtaggctgggcacagtggctcacgcctataatcccagcactttgggaggccgaggtgggcagatcactcgtcgaggtcagaagttcgagaccagcctggccaacatggtgaaaccccgtgtctaccaaatatacct

SEQ ID NO: 5034 - DNA, 661 bp, Homo sapiens
  misc_feature [331]..[331]: Chromosome 16, SNP identification no. = rs6499194
  misc_feature [331]..[331]: allele = c, in linkage disequilibrium with rs11865026, respectively
  misc_feature [331]..[331]: n is a, t, c or g
atggagtcctcccagatatcctggaattcaaccacttctgtccattctccaccaccacctttgtcccagccaccagcaccccaactgggatggccacaatggcctctgcgctggttaattccccgtttcccccagatccactctcttcccttcttcccgctgctctgcaaccaggaggcagccctagctgccctgtgttctggattaggttggttacattgggggaaggaacccacaggagatggggcgggaaggaggggaagtggcagtatccctccgcctgctccctccctgccgggctgggtttggcactggctgcgctctgcacccnctatggccacagctcctgtcatgtggaccctcttccatggctccaacactccctggggtctgaaaggcagtttctgcacttgccctgttaggactaagggctgccctggcttcccatttgctagtctgaggatgcctcgccatcccagctggtcaccctaaccgagtggttctcaaccaggggtagttatgccatctcaggggatatttggcaatgtctggagtcatttgtggttgttaccactggagtgggggtgctactggcatctaatgagtagaggccagagatgttgctaaaccccctacaatgcacaggacagcccccacagca

SEQ ID NO: 5035 - DNA, 661 bp, Homo sapiens
  misc_feature [331]..[331]: Chromosome 16, SNP identification no. = rs10852450
  misc_feature [331]..[331]: allele = g, in linkage disequilibrium with rs11865026, respectively
  misc_feature [331]..[331]: n is a, t, c or g
gcagccctgtagtcccagctactcgggaggctgaggcaggagaattacttgaacctgggagacggaggttgcagtgagccaagatggtgtcactgcactccagcctgggcgacagagcacgactctcaaaaaaaaaagaaaggatttgaatccagctcttgcccactccacagtagtattaattgcataactgagtgagaggaactggggcgatgttcaagtagcccgggcacaccctggagtcctgctcatcttctcccagagacatagccccactccagcctgcagggagttgcccaatagcaaggccaaggtctgtactcataaagcnttcttggtgcacagcattttaataaagacatgttgttctttgccctgagaagccgccccacttcctgccaccccacagggaggtcctgggaatggttaacattgctttgctgatgaatagcctctggagtagcgtaagaaacaaaagacctcacagtaccaggcctgctgccagatccctggaccacccctctccttgctggtgggcacaacatatggttcaaaaacctgaaacaagcacatgacctttgacccagtaactccacttggagaagttcatcttaaagacctgcccatacaatttctcacaggtgtacagattaaggatttc

SEQ ID NO: 5036 - DNA, 661 bp, Homo sapiens
  misc_feature [331]..[331]: Chromosome 16, SNP identification no. = rs8059194
  misc_feature [331]..[331]: allele = a, in linkage disequilibrium with rs11865026, respectively
  misc_feature [331]..[331]: n is a, t, c or g
aaagaaaggatttgaatccagctcttgcccactccacagtagtattaattgcataactgagtgagaggaactggggcgatgttcaagtagcccgggcacaccctggagtcctgctcatcttctcccagagacatagccccactccagcctgcagggagttgcccaatagcaaggccaaggtctgtactcataaagcgttcttggtgcacagcattttaataaagacatgttgttctttgccctgagaagccgccccacttcctgccaccccacagggaggtcctgggaatggttaacattgctttgctgatgaatagcctctggagtagcntaagaaacaaaagacctcacagtaccaggcctgctgccagatccctggaccacccctctccttgctggtgggcacaacatatggttcaaaaacctgaaacaagcacatgacctttgacccagtaactccacttggagaagttcatcttaaagacctgcccatacaatttctcacaggtgtacagattaaggatttcctcgcaacattgcttgtaagactaagcattggccaggcactgtggctcatgcctgtaatcccaacactttgggaggctgaggcgggtggatcacctgaaatcaggaattcgagacctgcttgaccaacatggtg

SEQ ID NO: 5037 - DNA, 661 bp, Homo sapiens
  misc_feature [331]..[331]: Chromosome 16, SNP identification no. = rs4783565
  misc_feature [331]..[331]: allele = g, in linkage disequilibrium with rs11865026, respectively
  misc_feature [331]..[331]: n is a, t, c or g
ctcgcaacattgcttgtaagactaagcattggccaggcactgtggctcatgcctgtaatcccaacactttgggaggctgaggcgggtggatcacctgaaatcaggaattcgagacctgcttgaccaacatggtgaaaccccatctctactaaaaatacaaaattggctgggtgtggtggtgcatgtctgtaatcccagctacttgggaggctgaggcaggagaatcacttgaacccgggaggcggaggttgcagtgagagaaaaaaaaaaaaaagactaagcactggaaaaaacccaggttcttcaaaaagggaattgattcaataaattntaggcattcaaatcgtggaaaatcatactgacattaaagtgctattgaggcagccaggcacagtggctcactcctgtaatcccagtactttgggaagccaaagtgggaagattgcttgagcccaggagctcgagaccaggctgggcaacatatcgagaccctcatctctacaaaagattaaaaatcagccatgtgtggtggttcttgcctgtagtcccagatactccagaggctgaggtgggaaatttacttgagcccaggagtttgaggttacaatgagctatgaccatgccactgcactccagcctgggtgacagaatgagactccgg

SEQ ID NO: 5038 - DNA, 661 bp, Homo sapiens
  misc_feature [331]..[331]: Chromosome 16, SNP identification no. = rs4500718
  misc_feature [331]..[331]: allele = t, in linkage disequilibrium with rs11865026, respectively
  misc_feature [331]..[331]: n is a, t, c or g
cccaggaggtcgaggctgcagtaagccatgatcacaccactgcataccagcttgggtgccagagtgaaaccctgtctcaagaaaaaactccaaaccaaaccaaaacaaaaaacctcacagaactgaatcccaaaaagtgtgaattttaccatatgcaaactaattttttttaacatgaggggaggctaaaaaaaaaaaagagaaagaaagagagcgtgagatctgtgaaattctgggtagcaagggaattccccatgcataccctgaatcagatctttgcagaacctcttaaaatctaaagtttgtcaagcccagcctgacagctgtgtcngggacttgctggtgaccttgggcaagtacctttgcctcccagaaacatagtttcttagcccagaaagggaagagagagctctaaacatctctaacaaggcacagacatctattgagcactgagtcactgccaggctacccatacatgtgttttttcacatcagaagggtagggcaagacaatagtgttttaaatgttctttattaagtctttttttttttttttgagatggagtctcgctctgttgcccaggccggaatgcagtggcacgatctcagttcactgcaacatctgcctcccaggctcaagcgattctcctgcctcagcctcc

SEQ ID NO: 5039 - DNA, 661 bp, Homo sapiens
  CDH1
  misc_feature [331]..[331]: Chromosome 16, SNP identification no. = rs16260
  misc_feature [331]..[331]: allele = c, in linkage disequilibrium with rs11865026, respectively
  misc_feature [331]..[331]: n is a, t, c or g
aaaattagcctggcgtggtggtgtgcacctgtactcccagctactagagaggctggggccagaggaccgcttgagcccaggagttcgaggctgcagtgagctgtgatcgcaccactgcactccagcttgggtgaaagagtgagaccccatctccaaaacgaacaaacaaaaaatcccaaaaaacaaaagaactcagccaagtgtaaaagccctttctgatcccaggtcttagtgagccaccggcggggctgggattcgaacccagtggaatcagaaccgtgcaggtcccataacccacctagaccctagcaactccaggctagagggtcancgcgtctatgcgaggccgggtgggcgggccgtcagctccgccctggggaggggtccgcgctgctgattggctgtggccggcaggtgaaccctcagccaatcagcggtacggggggcggtgcctccggggctcacctggctgcagccacgcaccccctctcagtggcgtcggaactgcaaagcacctgtgagcttgcggaagtcagttcagactccagcccgctccagcccggcccgacccgaccgcacccggcgcctgccctcgctcggcgtccccggccagccatgggcccttggagccgcagcctctcggcgctgctgctgctgctgc

SEQ ID NO: 5040 - DNA, 661 bp, Homo sapiens
  CDH1
  misc_feature [331]..[331]: Chromosome 16, SNP identification no. = rs11865026
  misc_feature [331]..[331]: allele = c, t
  misc_feature [331]..[331]: n is a, t, c or g
gagcaagggaaggggctagtttctcttctggtttcactgaatcccaagtgcttcctttatatcaaaccactttctcctctctcatgattttacttgattgggtatcacaataagaggcattttttttttaagagaaatcacccacaattcccctgagggaacacctccactgtgtcattcttccagtctttgaccacatgaatctttagcaatcacgctgttgtctttacattttttttttgaactttggaagtcattcgaagttttttacagagaaactacagctcgactgatgaagtatatttgctctgtgtgctctagagctttctantggatcagaagttatctctaactcctgggctcaagtgattcacccgccttggcctcccagagtgctggggattggatattttgatgtcagtgggcattgaggagtggcttctcggggaaggcaaacttgatccagtcttggagagcaaggcaggggctagaaacaagcttgtatctgagcatgcgtctggggtgtcccagtgctaaggctggtgactttgttttcctgcaccaagatatttggtagcaccaagggtgggttggtctggtttttatttctcccttctaagctcctgtgtttgaccaataatattattacatattaacacta

SEQ ID NO: 5041 - DNA, 661 bp, Homo sapiens
  CDH1
  misc_feature [331]..[331]: Chromosome 16, SNP identification no. = rs7203337
  misc_feature [331]..[331]: allele = c, in linkage disequilibrium with rs11865026, respectively
  misc_feature [331]..[331]: n is a, t, c or g
ctggggtgtcccagtgctaaggctggtgactttgttttcctgcaccaagatatttggtagcaccaagggtgggttggtctggtttttatttctcccttctaagctcctgtgtttgaccaataatattattacatattaacactaatatgttaataattaatagtgacacgtattcacttttgcctcagactctggggcaagtgcttcacatattttacctcatttagtcttcactagaacgttaggagggtgggcactgttattcttcctactttgcaagtgaggaaactgaggcataaagcaattctgtaatctgaagcatccgcagttngtcttttctcttcctttttctccttgtttttcacctcaataacctgaaaaaacaaaaacaaagaaaaaaggtgtttggggaattagtgtccaatgtgaagtaagctgagaatggaggtgttgacagggtgggacctccgagagggggtggtgatgatggagatgggtcagacccgggggaggtggcgggggaccctgggactggtgatttagtgggaagaggcagccttcacacagaatccgcaggcctctggtgtggttggtttcagttccctttatgttcacagacccccacccccacacaacagatttcctgacatttaatatttgt

SEQ ID NO: 5042 - DNA, 661 bp, Homo sapiens
  CDH1
  misc_feature [331]..[331]: Chromosome 16, SNP identification no. = rs7200690
  misc_feature [331]..[331]: allele = c, in linkage disequilibrium with rs11865026, respectively
  misc_feature [331]..[331]: n is a, t, c or g
ttagaaccttccattatgctctgtgtgtgctggggatactgtgttcatagcttccctctgaacagctgtgcagggcaggcagggagatctcaaacctgagtctggaaatgggagggcatatagccatttttaagtgttttccacctttggtcaaataaaaagaaatctgtggtgcatgctcactctttctctctctatccccatctctagccatctccctttctttctctcttcctctttgttaatgtaagtttccctaggccagggatctcagtgtcccagcttgttcttgttactcttgggggactggggtttaggcctcctccctttntgcacttttcatcttcctccttccttcctcttacctgcctccaatcctccacttctgcccaagatttgggtggcatcttccccaaattcagaaggttcttgaatcagactgcctagatttcaatccagacaatgtcacttcccagcctagggatgtcagccaaggacttagtttccctctctgtaaaatgagcataatagcatggagacatcataggatggtatgtcaagcgttcagtgaatatgaaatattagagccccaggaggacttggtgctgtctgtttgaaagtctcccatgttttacgtttggttcaaaagatcccctgcgct

SEQ ID NO: 5043 - DNA, 661 bp, Homo sapiens
  CDH1
  misc_feature [331]..[331]: Chromosome 16, SNP identification no. = rs1078621
  misc_feature [331]..[331]: allele = a, in linkage disequilibrium with rs11865026, respectively
  misc_feature [331]..[331]: n is a, t, c or g
actacatgcacatgccaccacgcccagcaaatttttgcatttttttgatgctagtaccacaggtgcacgccaccatacctggctaaattttttttttaatctttgtagagatgggggtctcgccacgttgcccaggctggtctcaaactcctgggctcaagtaatcctgcggccttggcctcccaaagcactgggattacaggtgtgagccacagcatctatctggcctggataacttttaaaagccaagcagaagctgacaagttcaagatcatcccgactcccccggccctagctgcgccttgccccactcctcccactccagttctanacaacctccacgagcaggtcccctttcctaagccacaacaaacccgttccggtccaccctgagcaccctgcacagtggcaagcaaaaaaacgccagtttcttcctaacaaggcactaggcttagtcactgtttgcagtgcactgtttgcttaacacagaagcaggcagggtgaagaaactggtttggctggtttgctgggtgagagggagcgcaggggatcttttgaaccaaacgtaaaacatgggagactttcaaacagacagcaccaagtcctcctggggctctaatatttcatattcactgaacgcttgacataccatcctatgatg

SEQ ID NO: 5044 - DNA, 661 bp, Homo sapiens
  CDH1
  misc_feature [331]..[331]: Chromosome 16, SNP identification no. = rs12185157
  misc_feature [331]..[331]: allele = a, in linkage disequilibrium with rs11865026, respectively
  misc_feature [331]..[331]: n is a, t, c or g
taaagaaactcttgttccaaatgagacctactcaagccgcttggccaggcaggcatctggggcatggctcttgctgctgaaagagggaaagttactactgggacctaatggggcctgcctagaagggttgaacctgttccacatgagcaagatcataaacggtggccagctcaggaccccgtgggataattggccaagttctagataataattagctggctttgtaattaggagagcttgtaacaagccaaaagcctttcaaatttatttgacctgggcaagttcaagaagaagaagagcacctgattctgtggtttggcattcaggtacncctgtacaccttctttctccttggttttttttttttttttttaagacagggtctctgtcgctcaggctggagtacagtgaagccatcttggctcacttcagcctcgacctcccgggctcaagcaatcctcccacctcagcctcccaagtagctgggatacagacacacatcaccatgcccggctaatttttaaaattttctttggaaaagggatctcgctatattgcccagactggtctggaactcctgggctcaagggatcttcccaccttggcctcccaaagtgctggatttacaggcatgacgcccagctgtttctctattcccaaa

SEQ ID NO: 5045 - DNA, 661 bp, Homo sapiens
  CDH1
  misc_feature [331]..[331]: Chromosome 16, SNP identification no. = rs17772363
  misc_feature [331]..[331]: allele = g, in linkage disequilibrium with rs11865026, respectively
  misc_feature [331]..[331]: n is a, t, c or g
ttccttctctgaaggtctcaggtgacagaggtatttgtctgtccattcacttaatgaatttgtgctgagcacctgccaagccctctgctaggcattggggatgcagcggggcccaaacagagaaaaagccctgtcctcatggaatttctcttctaattggaggggacaggtagatggtgatgtatggaagaaagaataaaactcagcaggaagggtgataaaaactatgcattggggtggagaaatttaggggcagtcatcactaagaaggatggcatttgtgtaaagaagaagaagtgaggtgctcaatagatgttagaactggactgtntcagctgggtgtggtggtttatgactgtaatcccaagccaaggcaggtagatctcttgagcccaggagttcaagaccagcctgggcatgatagaaccccgcctctacaaaaaatccaaaaattagccaggtgtagtggcatatgcttgtagtcccagctacttgggagctggggtgagaggatcacttgagcctgggaggttgaagctgcctgggaggtttagccatgatcgtaccactgcattccagcctgggtgacagggcaagactctgtctcaaaaaaaaaaaaaaaaaaaaaatagaattggactgtatcttgaggggactggac

SEQ ID NO: 5046 - DNA, 661 bp, Homo sapiens
  CDH1
  misc_feature [331]..[331]: Chromosome 16, SNP identification no. = rs11642413
  misc_feature [331]..[331]: allele = a, in linkage disequilibrium with rs11865026, respectively
  misc_feature [331]..[331]: n is a, t, c or g
gagtgttcctaggacctggtacttactttggaatctcaccttcagtacgaggcttcctccccaacaaattcttcaccacaactatgtgggagtgtttgaaaaagggaacaagatgaccaacttgttggtggggagagttgtggctttcctattggaaaacatcatcccttgaataagcagtgaggcaaacacctgggcacttactttatgaacaggtggggtggggccctgagtcaccgacattgagaggcctctcctggtaaggtttttcaatatcaggttgaatcagcggtgacatcaccctctatagtgacaggtactctaggtgccngctcttactcataagtcccaggagatactagccctagatctcgtctctgttagcttcgtgctaaaaggttttggagaaataacagctgcttggtgacgttcatgtggctggtttcattaccacctaactcccaggcttgtaatcatgactaaattttctggagaaaatagaatttgtggttgtatttcttgtaacttttgccttcttgtctcaagtctgcatttaaaaagaggccgggtgcggtagctcatgcctgtaatccagcacttcgggaggccaaagtgggaggattgcttgagcccagaagttggagaccagattgggcaacaa

SEQ ID NO: 5047 - DNA, 661 bp, Homo sapiens
  CDH1
  misc_feature [331]..[331]: Chromosome 16, SNP identification no. = rs13333528
  misc_feature [331]..[331]: allele = c, in linkage disequilibrium with rs11865026, respectively
  misc_feature [331]..[331]: n is a, t, c or g
caagatgaccaacttgttggtggggagagttgtggctttcctattggaaaacatcatcccttgaataagcagtgaggcaaacacctgggcacttactttatgaacaggtggggtggggccctgagtcaccgacattgagaggcctctcctggtaaggtttttcaatatcaggttgaatcagcggtgacatcaccctctatagtgacaggtactctaggtgccggctcttactcataagtcccaggagatactagccctagatctcgtctctgttagcttcgtgctaaaaggttttggagaaataacagctgcttggtgacgttcatgtggntggtttcattaccacctaactcccaggcttgtaatcatgactaaattttctggagaaaatagaatttgtggttgtatttcttgtaacttttgccttcttgtctcaagtctgcatttaaaaagaggccgggtgcggtagctcatgcctgtaatccagcacttcgggaggccaaagtgggaggattgcttgagcccagaagttggagaccagattgggcaacaaagggaaaccctgtctctacatacaaaaacaattacccaggcatggtggcgtgtgcctgtgatcccagcttcatgggaggctgaggcaggtagatcccttgagtccagg

SEQ ID NO: 5048 - DNA, 661 bp, Homo sapiens
  CDH1
  misc_feature [331]..[331]: Chromosome 16, SNP identification no. = rs9646284
  misc_feature [331]..[331]: allele = c, in linkage disequilibrium with rs11865026, respectively
  misc_feature [331]..[331]: n is a, t, c or g
ttttgagtctctgatttttgttttgttttgttttgagacagagtcttgctctgtcacccaggctggagcgcagtgttggagtctcagctcactgcaacctccacctcccaggttcaagctattctccttcctcagcctcccgagtagctgggattataggccagcgccaccatgcccggctaatttttgtatttttagtagagacagggtttcaccatgttggccaggctggtcctgacctcaagtgatccgcccaccttggcctcccaaagtgctgggattacaggtgtgagccatggcaaccagctgagtttttgattttgaaacttcntgtaagttgtacttatttttctttgggctttgtaatttggttatgatttttcattcttctttctgctaatcctctcacttccaccatgggagtgtttaaatacctgggaagctgttgaacctaggaaaccacattttacttgccagatgtgaggtttcatttctggttttgacagagatttgactcttcagcatttatttctcttttagcctatgagcttctcttagagaagatgaactgggagggtggaatgcagcaggattgcctggattccaatcccaactggacccttacttttcctgtgattttgggcaagtttctttctctttc

SEQ ID NO: 5049 - DNA, 661 bp, Homo sapiens
  CDH1
  misc_feature [331]..[331]: Chromosome 16, SNP identification no. = rs9928847
  misc_feature [331]..[331]: allele = c, in linkage disequilibrium with rs11865026, respectively
  misc_feature [331]..[331]: n is a, t, c or g
ggttaccgttgtcagctccaggatttgaaatgctgattagttcattagcagttgtttataggcctttgcctgtctgacattttaaccctgtgaagtccaaggaaacagttctctgtctttaatgtgcttcaaaacctcctgcaaaactaactacaagtgcagactgcacccctagagattctgatgtttaagtctggggtgagtccaggaatctgcattttaaaataagcccatcctgtgctggaactggtggtccctggatcccactgcaaggacaacctgggcgagagcaggtttccaaacctgggccagagctggttggggggatggnggacacatggagagcttaaaagtggagactttgaggggctttccctcccagaggttttgagtcaagagatttgagatttgatgggtttttttgtttgtttacttgttaaaaaagatgattattggttgggtttggtgggggatgggctatgaagctacccgaagttgtagacaaaggggtgtgtgtgtgatcagttcacagatgtggatcatgtctacatctttcatcagatttctctgaggagtcatcccagatgacatttagggctaactctgagtggaattaccagtctaaaatgggagctggccaggcatggtggctcacgcctgt

SEQ ID NO: 5050 - DNA, 661 bp, Homo sapiens
  CDH1
  misc_feature [331]..[331]: Chromosome 16, SNP identification no. = rs13334471
  misc_feature [331]..[331]: allele = t, in linkage disequilibrium with rs11865026, respectively
  misc_feature [331]..[331]: n is a, t, c or g
actgtgctccagcctgggcgacagagtgagattctgtttacaaaacaaaacaaaaaaatttatattaccccattttatggatgaagacactgtggctctgagacatccccttgactatttcatggcagggcaaagattcacaacttgtccctaactgccggatgcaccgcttcccttccttgagaaaactggcccaggctctcccaaaatccaggggaccagtagcaggatttctttcaagggcatcttgtcttccggtcaatgttttccctctgtaaaatggcattagtagaacctacttcataaggttttgggggagattaaatgagangaacaatatagaatgtcatgtgtgcactcagaattacaattagttattactgataatgggtaaacataattgctattattattaacactgacatagccttactatatgtggggcattgccctgagcatttgtatagtaacatataattctcccagttactttgtgggagtagtaaggtctagaaccccctttttttttgagacagtctcactctgttgcccaggctggagtgcggtggtgtgatctcggctcactacaacttctgcctcctgggttcaagcaatcctcctgcctcagcctcccgagtagctgggattacaggcacccacc

SEQ ID NO: 5051 - DNA, 661 bp, Homo sapiens
  CDH1
  misc_feature [331]..[331]: Chromosome 16, SNP identification no. = rs4783676
  misc_feature [331]..[331]: allele = c, in linkage disequilibrium with rs11865026, respectively
  misc_feature [331]..[331]: n is a, t, c or g
cagcctcccgagtagctgggattacaggcacccaccatcacgcccggctgattttttgtatttttagtagagaaggtttcaccacgttggctaggctaacctcgaactcctgacctcaagtgatctgcctgtctcggcctcccaaattgctgggattacaggtgtgagccactgcgccccgcctagaccccatttttggatgaggaaactgagacccagagaagttcatttagctgtggtctgctgtgacagggagatctgccacttagaaagttttagggtcgttttattttcataatagaacacgatgaaccagaccatccctgctccnttttagaccattaagtttctttttttttttcttttcccctgagacagtctcgctctgttggccaggctagagtgcagtggcatgatctcaactcactgcaacctctacctcccgggctcaagcacttctcccgcctcagcctcccgagtagctgggattacaggggtgtgccaccatgcccggctaattttttttgtatttttagtgaagacagggtttcaccatgttggccaggctggtcttgaactcctgacctcaggtaattcacccacctcagcctcccaaagtgctgggattataggcctgagccaccgtgcccggcctagacca

SEQ ID NO: 5052 - DNA, 661 bp, Homo sapiens
  CDH1
  misc_feature [331]..[331]: Chromosome 16, SNP identification no. = rs8056538
  misc_feature [331]..[331]: allele = g, in linkage disequilibrium with rs11865026, respectively
  misc_feature [331]..[331]: n is a, t, c or g
gggttcaagtgccccagactcccaagtagctgggattacaggcatgcgtcaccacacccagctaattttgcatttttagtagagacaaggtttctccacgttgatcaggctggtctcgaagtcctgacctcaggtgatctgtccgccttggcctcccgaagtgctgggattacaggcgtgagccactgcgcccggcttaattacgatttaagaaaaaagatgagtataggaagaaggttggatagtgatgtgtttgccacagacctagatccctgctaaaagcagaccacagatttgactctgagcaaagaggaaaacaagatcagttgcntaattaggtttctatgagttaagcataaatctgttccttagagaggatccagtttctccacagagctcttaccttcatgtgattttggcaacagctcttaataccttggactttccattgatatttgtcattttgcagctaatacatgttagttgtggggaaaactttggaaaatatagatagctaaaagaaaaaagctgggtgcagtggtacatgcctatagtcccaggtgttccctggaggctgaggtgagaggatcagttgagcccaagtgttgaagtccagcctccatagggagataccatctcttaataaaaagaacaaaaatat

SEQ ID NO: 5053 - DNA, 661 bp, Homo sapiens
  CDH1
  misc_feature [331]..[331]: Chromosome 16, SNP identification no. = rs12930371
  misc_feature [331]..[331]: allele = c, in linkage disequilibrium with rs11865026, respectively
  misc_feature [331]..[331]: n is a, t, c or g
aaaatatttaaattgtgtgtaaagtcactatctagatatcaccaccggggaacatttttgtatacatcctcctagaagtaaggtctctattattatcttatatgttgtaatataaatgcaagtataagtaatggcattttactaaagtaaatcgttatccaacactctctgcctcagggccatggtgcctgctgttccctgtgcccagagcacccttcccccaggcatcctcatgccactcttgcttatctctttccagtctctgctcaaactgccccagttctcagcagagtctgtcttggataatagctcacatctatacccttgtcantgtaccgcctaccctgccttttttccatggcactgattactattcaatttcatgatctgcttgtctccctctctttgaatatgagctccttgagggtgggtctgttttgttcattgctgtacttctagggcttgggctcagaattctgcccagcatagaggaggtcctcagatatttgaatgactccacacagctatttctgtattcattacaaatacatctatatcaataactactgaaatatgcctatagaaatgtttcatacagttagatttatgtgtatactttttttcaaaatcatgctcttgctcttcctacttcaatgtctgt

SEQ ID NO: 5054 - DNA, 661 bp, Homo sapiens
  CDH1
  misc_feature [331]..[331]: Chromosome 16, SNP identification no. = rs12446407
  misc_feature [331]..[331]: allele = g, in linkage disequilibrium with rs11865026, respectively
  misc_feature [331]..[331]: n is a, t, c or g
gcctggctaatttttttgtattcttagtagagacggggtttcaccgtgttagccaggatggtctcaatctcctgagctcgtcatgatctgcccacctcggcctcccaaagtgctgggattacaggtgtgagccaccgcagctggcttttttttttttttttttaaagaaaatggtagcctctgatggctgctgtcatgcccccggttgttttcaggtccaagtctatctggagacctttcctccctgtcaattaggggtcctttcttggctactattatgttgctttcttcatctttgcctcagaatcataaagttggaagggcttttggngccacctggcctagccctctctgccaccaccaggtgtgtgctctggggagctctgcctcctgtcctaaaactgtcaccttcctgactgggcctgtcttccacaagacatcgcctggctagaccccctctgactacatcttttcctgtgcctggaaggacctcagaggtaagtatttgggtctcttgtgtcccatccccactcccggagcccaaagctcagtccgcagcacatagagggcccttaggggatgttcatggacagctgaatgactctgcctctgccttcaggtgggtaccagccagttgacatccagattcattcagagcctg

SEQ ID NO: 5055 - DNA, 661 bp, Homo sapiens
  CDH1
  misc_feature [331]..[331]: Chromosome 16, SNP identification no. = rs12446413
  misc_feature [331]..[331]: allele = a, in linkage disequilibrium with rs11865026, respectively
  misc_feature [331]..[331]: n is a, t, c or g
aattaggggtcctttcttggctactattatgttgctttcttcatctttgcctcagaatcataaagttggaagggcttttggggccacctggcctagccctctctgccaccaccaggtgtgtgctctggggagctctgcctcctgtcctaaaactgtcaccttcctgactgggcctgtcttccacaagacatcgcctggctagaccccctctgactacatcttttcctgtgcctggaaggacctcagaggtaagtatttgggtctcttgtgtcccatccccactcccggagcccaaagctcagtccgcagcacatagagggcccttaggggntgttcatggacagctgaatgactctgcctctgccttcaggtgggtaccagccagttgacatccagattcattcagagcctgctgtgggccaggcaccagcctcgcaccttcagggaacgtggcaataaataaggatttcagagggcagcacattctagaaggatgtaaagcagtgaaacggggtagggagtgcctggggtagtggtgcagggcccctttagctgaggagtggatcaggcaggaggatgtttgtgtggtacctagtggtagaaaggaggacaccatgaagagagcagtaggaagagaattccaagcagaggaacagcaagg

SEQ ID NO: 5056 - DNA, 661 bp, Homo sapiens
  CDH1
  misc_feature [331]..[331]: Chromosome 16, SNP identification no. = rs12443730
  misc_feature [331]..[331]: allele = t, in linkage disequilibrium with rs11865026, respectively
  misc_feature [331]..[331]: n is a, t, c or g
attatgttgctttcttcatctttgcctcagaatcataaagttggaagggcttttggggccacctggcctagccctctctgccaccaccaggtgtgtgctctggggagctctgcctcctgtcctaaaactgtcaccttcctgactgggcctgtcttccacaagacatcgcctggctagaccccctctgactacatcttttcctgtgcctggaaggacctcagaggtaagtatttgggtctcttgtgtcccatccccactcccggagcccaaagctcagtccgcagcacatagagggcccttaggggatgttcatggacagctgaatgactcngcctctgccttcaggtgggtaccagccagttgacatccagattcattcagagcctgctgtgggccaggcaccagcctcgcaccttcagggaacgtggcaataaataaggatttcagagggcagcacattctagaaggatgtaaagcagtgaaacggggtagggagtgcctggggtagtggtgcagggcccctttagctgaggagtggatcaggcaggaggatgtttgtgtggtacctagtggtagaaaggaggacaccatgaagagagcagtaggaagagaattccaagcagaggaacagcaagggctgagagcctgagacaggaaggag

SEQ ID NO: 5057 - DNA, 661 bp, Homo sapiens
  CDH1
  misc_feature [331]..[331]: Chromosome 16, SNP identification no. = rs4783681
  misc_feature [331]..[331]: allele = c, in linkage disequilibrium with rs11865026, respectively
  misc_feature [331]..[331]: n is a, t, c or g
ttcgtgccatgcatggaagggcggggctccattagaacttggaagcttcctctctaatttatggtttgtccctctccaacatatgggagagatagataagtctctttaattagttcactaagattaataagccatagacccatcaaggaaaattcaataaatgttcactgggcatcttttatgcaccaggctctgtctacattcagagcgagagaacagtcacagctgacatctatggaccacttacaactggcctggctctgggctaacccgcaccgtatacagatcttatatatacttcactccataccctgtgatgtaggtcttcctnaaaatcaccacactatgtcaaattgcccatgaaaaacaccagacttaggctgggcacggtggctcaagcctgtaatcccagtactttgggaggccgaggcaggtggatcgcttgtgcccaggagttcaggaccagcctgggcaacagagtgagaccccatcctaacaaaaaatacaaaaagtacaaaaaaattacctgggggtcccagctacccagaaggctgaggtgggaggatcgcttgagcctgggaggtcaatgctgcagtgagccatgattgtgtcactggattccagcctgggcaacagagtgacacccagtctcaaaaaacaa

SEQ ID NO: 5058 - DNA, 661 bp, Homo sapiens
  CDH1
  misc_feature [331]..[331]: Chromosome 16, SNP identification no. = rs4783570
  misc_feature [331]..[331]: allele = g, in linkage disequilibrium with rs11865026, respectively
  misc_feature [331]..[331]: n is a, t, c or g
ttagaacttggaagcttcctctctaatttatggtttgtccctctccaacatatgggagagatagataagtctctttaattagttcactaagattaataagccatagacccatcaaggaaaattcaataaatgttcactgggcatcttttatgcaccaggctctgtctacattcagagcgagagaacagtcacagctgacatctatggaccacttacaactggcctggctctgggctaacccgcaccgtatacagatcttatatatacttcactccataccctgtgatgtaggtcttcctcaaaatcaccacactatgtcaaattgcccatnaaaaacaccagacttaggctgggcacggtggctcaagcctgtaatcccagtactttgggaggccgaggcaggtggatcgcttgtgcccaggagttcaggaccagcctgggcaacagagtgagaccccatcctaacaaaaaatacaaaaagtacaaaaaaattacctgggggtcccagctacccagaaggctgaggtgggaggatcgcttgagcctgggaggtcaatgctgcagtgagccatgattgtgtcactggattccagcctgggcaacagagtgacacccagtctcaaaaaacaaaaacaaaaaccaaaaccaccaggcttatggg

SEQ ID NO: 5059 - DNA, 661 bp, Homo sapiens
  CDH1
  misc_feature [331]..[331]: Chromosome 16, SNP identification no. = rs13334326
  misc_feature [331]..[331]: allele = c, in linkage disequilibrium with rs11865026, respectively
  misc_feature [331]..[331]: n is a, t, c or g
aatgaagccaagcatggtggtgcgcacctgtggtcccagctactcagaaggctgaggtgggaggaatgcttgagcctgggaggtccagggtgcaatgagctatgattgcaccattgcactccagcctgggtgatagggcaaggccctgtctcaaaaaaaaaaaaaaaagaaaaaagaacaccctcattttacaattaacattgtcatatttgccttctctgtgtgtgcctcttaagtgtgtgcgtccgagcatgcactttatgagccatttgaaagtacgctgcaggcatgtttcacccctaaatactttagtctgcatctcctgaaccanaatgccattatcacaactaagaaaacgtataatgtcatctaacatccaactctgatggcaaatattcccaaccatgccaagaatgtcttgtgtttattacaaactctcacatgcaagtcatttcaaacatcacctcccgagatccttgtgtacccagaagggaacatgagaagagaaggtggtgttcttgcctttggtttgcctaaggccccctttttgttctcccactttggattcggttggattctaggagcagttacacatttctgtttttgtgtttaaaagcatgtaggtttcatgtaagctatatgcatgcacacactagccaca

SEQ ID NO: 5060 - DNA, 661 bp, Homo sapiens
  CDH1
  misc_feature [331]..[331]: Chromosome 16, SNP identification no. = rs13339591
  misc_feature [331]..[331]: allele = t, in linkage disequilibrium with rs11865026, respectively
  misc_feature [331]..[331]: n is a, t, c or g
tgcttgagcctgggaggtccagggtgcaatgagctatgattgcaccattgcactccagcctgggtgatagggcaaggccctgtctcaaaaaaaaaaaaaaaagaaaaaagaacaccctcattttacaattaacattgtcatatttgccttctctgtgtgtgcctcttaagtgtgtgcgtccgagcatgcactttatgagccatttgaaagtacgctgcaggcatgtttcacccctaaatactttagtctgcatctcctgaaccacaatgccattatcacaactaagaaaacgtataatgtcatctaacatccaactctgatggcaaatatncccaaccatgccaagaatgtcttgtgtttattacaaactctcacatgcaagtcatttcaaacatcacctcccgagatccttgtgtacccagaagggaacatgagaagagaaggtggtgttcttgcctttggtttgcctaaggccccctttttgttctcccactttggattcggttggattctaggagcagttacacatttctgtttttgtgtttaaaagcatgtaggtttcatgtaagctatatgcatgcacacactagccacacatgggactcaagtttgtaatttaaaaagacatttccttcccctataataaagcatagctggcatt

SEQ ID NO: 5061 - DNA, 661 bp, Homo sapiens
  CDH1
  misc_feature [331]..[331]: Chromosome 16, SNP identification no. = rs1125557
  misc_feature [331]..[331]: allele = a, in linkage disequilibrium with rs11865026, respectively
  misc_feature [331]..[331]: n is a, t, c or g
atattcccaaccatgccaagaatgtcttgtgtttattacaaactctcacatgcaagtcatttcaaacatcacctcccgagatccttgtgtacccagaagggaacatgagaagagaaggtggtgttcttgcctttggtttgcctaaggccccctttttgttctcccactttggattcggttggattctaggagcagttacacatttctgtttttgtgtttaaaagcatgtaggtttcatgtaagctatatgcatgcacacactagccacacatgggactcaagtttgtaatttaaaaagacatttccttcccctataataaagcatagctgncatttctacatctgaagcgtctaagataaagctgatggtatcagcatgttgctctccaaagaaacaaaaggttatgatttgatagaccctgaaattagacatcaaggtcaagaaagtgtaaacttaggtgtggtcgttttccaaagctgtcactcagatgtttagcaaaatgtccccctttacatttcccctgtcttccacaggtctcccccatccacccaaaaggaggaaagttaggagggaagattgtcaaaagtcctcaaatatggctattttagatttctttttttcttttggtgagacagagtctcagtttatcacccagactgg

SEQ ID NO: 5062 - DNA, 661 bp, Homo sapiens
  CDH1
  misc_feature [331]..[331]: Chromosome 16, SNP identification no. = rs9282650
  misc_feature [331]..[331]: allele = t, in linkage disequilibrium with rs11865026, respectively
  misc_feature [331]..[331]: n is a, t, c or g
actctcacatgcaagtcatttcaaacatcacctcccgagatccttgtgtacccagaagggaacatgagaagagaaggtggtgttcttgcctttggtttgcctaaggccccctttttgttctcccactttggattcggttggattctaggagcagttacacatttctgtttttgtgtttaaaagcatgtaggtttcatgtaagctatatgcatgcacacactagccacacatgggactcaagtttgtaatttaaaaagacatttccttcccctataataaagcatagctggcatttctacatctgaagcgtctaagataaagctgatggtancagcatgttgctctccaaagaaacaaaaggttatgatttgatagaccctgaaattagacatcaaggtcaagaaagtgtaaacttaggtgtggtcgttttccaaagctgtcactcagatgtttagcaaaatgtccccctttacatttcccctgtcttccacaggtctcccccatccacccaaaaggaggaaagttaggagggaagattgtcaaaagtcctcaaatatggctattttagatttctttttttcttttggtgagacagagtctcagtttatcacccagactggagtgcagtggtgcaatcttggcttactgcaacctctacctc

SEQ ID NO: 5063 - DNA, 661 bp, Homo sapiens
  CDH1
  misc_feature [331]..[331]: Chromosome 16, SNP identification no. = rs17772411
  misc_feature [331]..[331]: allele = t, in linkage disequilibrium with rs11865026, respectively
  misc_feature [331]..[331]: n is a, t, c or g
cagcttttaaagaatgggagtgcatcacatctacttttaaaggaaagctgagcatgttttgagttatgcacagttttcagcaaaacagcccatgcatgaaatccaacaggcttgtcagattaggctggtcactttacattatatactttctcatgtagttctcacgacagtcctgttatttagagattgccattcggcccatcttatagagaggaaactaaggcttagagagggtaagtgacttaacctcaagtatgtctgagtggtggagctgaaacctcaatcttggtgtggctgacttcagacttgttacttgtaaccaccgtgcagncccaagcttgtgtttgttgctgttccaaatgcaacattggtgcctctaagcctcatatcatgaactggttcagagagagaaagccacagtccccccaggttcatttagtgtgtgttcaggtgtgttggcatggtgcttccttcagtctttctcaagcctcataggcagaaaacccttcatgaaagcatagtggtcaagagccacgggctctggggccagacggcctgtgcttgctcgaattccaggttcacaccagtaacttgtaagttatgtgaccttgggcaagttactcaaccctcatatgcctcagttttctcatttgtcaaatgg

SEQ ID NO: 5064 - DNA, 661 bp, Homo sapiens
  CDH1
  misc_feature [331]..[331]: Chromosome 16, SNP identification no. = rs2113199
  misc_feature [331]..[331]: allele = a, in linkage disequilibrium with rs11865026, respectively
  misc_feature [331]..[331]: n is a, t, c or g
tatccttcctccctgtttattttattttattattttttgtttatttattttgagacagagtctccctttgtcacccaggttggagtgcagtggcatgattttggctcactgcaacctgtacctcctgggttcaagtgattctctcctgcctcagcctcccaagtagctgggattacaggtgtgcaccaccacacctggctaatttttgtatttttagtagagatagggtttcgccatgttggccaggctgatttcaagtgatctacccatctcgacctcccaaagtgcttgggattacgggcttcggccaccatgcccagcacctgttctnttgttttctctacagcgtttactaccttattgtatgtttttggctaaagggccttggagtcaaccccaggagaacagtgctgatgaatcaggagtggcgctcccataacttcatgcgtcttcaaagctggctagtactgcacctcattctcgtgatttcatgcccacagttacctccagggtgttggctgagcagagcaagtgacatgagggtagttggtgacaaagtcagaagtagctgaggcctcactgtagagagctgggcttttattctgggaaaagtgagtctctggagggctctgcatagagcagaggcttgtcatggcctgac

SEQ ID NO: 5065 - DNA, 661 bp, Homo sapiens
  CDH1
  misc_feature [331]..[331]: Chromosome 16, SNP identification no. = rs12599517
  misc_feature [331]..[331]: allele = t, in linkage disequilibrium with rs11865026, respectively
  misc_feature [331]..[331]: n is a, t, c or g
agtggcatgattttggctcactgcaacctgtacctcctgggttcaagtgattctctcctgcctcagcctcccaagtagctgggattacaggtgtgcaccaccacacctggctaatttttgtatttttagtagagatagggtttcgccatgttggccaggctgatttcaagtgatctacccatctcgacctcccaaagtgcttgggattacgggcttcggccaccatgcccagcacctgttctattgttttctctacagcgtttactaccttattgtatgtttttggctaaagggccttggagtcaaccccaggagaacagtgctgatgaancaggagtggcgctcccataacttcatgcgtcttcaaagctggctagtactgcacctcattctcgtgatttcatgcccacagttacctccagggtgttggctgagcagagcaagtgacatgagggtagttggtgacaaagtcagaagtagctgaggcctcactgtagagagctgggcttttattctgggaaaagtgagtctctggagggctctgcatagagcagaggcttgtcatggcctgaccgaggttgtagcaagctcaatgcggctactgtgtagagaagacgccgtagcaacctgggccagaattgggaagattaaggagctactg

SEQ ID NO: 5066 - DNA, 661 bp, Homo sapiens
  CDH1
  misc_feature [331]..[331]: Chromosome 16, SNP identification no. = rs12597188
  misc_feature [331]..[331]: allele = g, in linkage disequilibrium with rs11865026, respectively
  misc_feature [331]..[331]: n is a, t, c or g
tgttctattgttttctctacagcgtttactaccttattgtatgtttttggctaaagggccttggagtcaaccccaggagaacagtgctgatgaatcaggagtggcgctcccataacttcatgcgtcttcaaagctggctagtactgcacctcattctcgtgatttcatgcccacagttacctccagggtgttggctgagcagagcaagtgacatgagggtagttggtgacaaagtcagaagtagctgaggcctcactgtagagagctgggcttttattctgggaaaagtgagtctctggagggctctgcatagagcagaggcttgtcatgncctgaccgaggttgtagcaagctcaatgcggctactgtgtagagaagacgccgtagcaacctgggccagaattgggaagattaaggagctactgcaatggtccaggagtccagagatgaattgagtctgtggggaaaaaagtgtcggctgacaagccgttctgtctccatgttctcctctcaccttttgaccaccctgtccccactcctcagctgtgctttgtattttgtaattcgcagcactcaaagcactcacacaggaggcctgacattatttatctgcaggtcagagggtttgagttgagggtgggggtattggaaacaattaggc

SEQ ID NO: 5067 - DNA, 661 bp, Homo sapiens
  CDH1
  misc_feature [331]..[331]: Chromosome 16, SNP identification no. = rs2113200
  misc_feature [331]..[331]: allele = t, in linkage disequilibrium with rs11865026, respectively
  misc_feature [331]..[331]: n is a, t, c or g
cgtcttcaaagctggctagtactgcacctcattctcgtgatttcatgcccacagttacctccagggtgttggctgagcagagcaagtgacatgagggtagttggtgacaaagtcagaagtagctgaggcctcactgtagagagctgggcttttattctgggaaaagtgagtctctggagggctctgcatagagcagaggcttgtcatggcctgaccgaggttgtagcaagctcaatgcggctactgtgtagagaagacgccgtagcaacctgggccagaattgggaagattaaggagctactgcaatggtccaggagtccagagatgaatngagtctgtggggaaaaaagtgtcggctgacaagccgttctgtctccatgttctcctctcaccttttgaccaccctgtccccactcctcagctgtgctttgtattttgtaattcgcagcactcaaagcactcacacaggaggcctgacattatttatctgcaggtcagagggtttgagttgagggtgggggtattggaaacaattaggcattgtggcctcagttgcctccgcttcattctccaccctcctccacacacccgcagcactcattttaacccctcagtatgtcttttactttttccttcctttttagagttagggtctcactct

SEQ ID NO: 5068 - DNA, 661 bp, Homo sapiens
  CDH1
  misc_feature [331]..[331]: Chromosome 16, SNP identification no. = rs2113201
  misc_feature [331]..[331]: allele = c, in linkage disequilibrium with rs11865026, respectively
  misc_feature [331]..[331]: n is a, t, c or g
agttacctccagggtgttggctgagcagagcaagtgacatgagggtagttggtgacaaagtcagaagtagctgaggcctcactgtagagagctgggcttttattctgggaaaagtgagtctctggagggctctgcatagagcagaggcttgtcatggcctgaccgaggttgtagcaagctcaatgcggctactgtgtagagaagacgccgtagcaacctgggccagaattgggaagattaaggagctactgcaatggtccaggagtccagagatgaattgagtctgtggggaaaaaagtgtcggctgacaagccgttctgtctccatgttntcctctcaccttttgaccaccctgtccccactcctcagctgtgctttgtattttgtaattcgcagcactcaaagcactcacacaggaggcctgacattatttatctgcaggtcagagggtttgagttgagggtgggggtattggaaacaattaggcattgtggcctcagttgcctccgcttcattctccaccctcctccacacacccgcagcactcattttaacccctcagtatgtcttttactttttccttcctttttagagttagggtctcactctgtcatccaggctggtgtgcaatggtgtgatcacggctagttgcagccttgac

SEQ ID NO: 5069 - DNA, 661 bp, Homo sapiens
  CDH1
  misc_feature [331]..[331]: Chromosome 16, SNP identification no. = rs12448999
  misc_feature [331]..[331]: allele = a, in linkage disequilibrium with rs11865026, respectively
  misc_feature [331]..[331]: n is a, t, c or g
tttaacccctcagtatgtcttttactttttccttcctttttagagttagggtctcactctgtcatccaggctggtgtgcaatggtgtgatcacggctagttgcagccttgacctcctgggctcaagcaattaactccacctcagcctgcccagtaattgggactacaggagcatgccactacacctggctaattttttctttttttagagatggggtcttgccatgttgcccaggttggtgtcgaactcctgagctcaagcaatccatcccccttggcctcccaaagtgcggggataacaggcatgcaacaccatgcccggccaatttttnaattttctttattgacagggtctcactatgttgcccaggctgatctcaaactcctggactcgagtgatctccctgccttagccaaactgctgggattacaggcctgagcaatcatgccgggccccctcagtatatctttaatccctttgggatctgagactctttgagagactgttgaagaccacagagcctcccacaggtgcccatatcttaacccacagttccagggggcccatgccttccttgatgcccttcactagcccaaaccttggctcaaatcctaggcactcactgctaaggcctcaaggagggggtcagaaaaacaaaacc

SEQ ID NO: 5070 - DNA, 661 bp, Homo sapiens
  CDH1
  misc_feature [331]..[331]: Chromosome 16, SNP identification no. = rs7186333
  misc_feature [331]..[331]: allele = t, in linkage disequilibrium with rs11865026, respectively
  misc_feature [331]..[331]: n is a, t, c or g
cggggataacaggcatgcaacaccatgcccggccaattttttaattttctttattgacagggtctcactatgttgcccaggctgatctcaaactcctggactcgagtgatctccctgccttagccaaactgctgggattacaggcctgagcaatcatgccgggccccctcagtatatctttaatccctttgggatctgagactctttgagagactgttgaagaccacagagcctcccacaggtgcccatatcttaacccacagttccagggggcccatgccttccttgatgcccttcactagcccaaaccttggctcaaatcctaggcacncactgctaaggcctcaaggagggggtcagaaaaacaaaaccgcagcccaggaaactcctttcatggccacagagatgtttccagatggcctgagaagggagtggttggtgtgggcagctgctgttccccatggtatcaaatctttgatcaagaggggtggaaaaggattgactttctcaagttcagggcttccttctggctccacaggcaccccccacaggcaagggaccaccacacccaaaggcaggagtggccaatcctgagggcgtggacgggggccacagggaggcagtccacaccctcaggatttgaccctacagggaaggccct

SEQ ID NO: 5071 - DNA, 661 bp, Homo sapiens
  CDH1
  misc_feature [331]..[331]: Chromosome 16, SNP identification no. = rs7186084
  misc_feature [331]..[331]: allele = g, in linkage disequilibrium with rs11865026, respectively
  misc_feature [331]..[331]: n is a, t, c or g
gagaagggagtggttggtgtgggcagctgctgttccccatggtatcaaatctttgatcaagaggggtggaaaaggattgactttctcaagttcagggcttccttctggctccacaggcaccccccacaggcaagggaccaccacacccaaaggcaggagtggccaatcctgagggcgtggacgggggccacagggaggcagtccacaccctcaggatttgaccctacagggaaggccctggggatgttgccctgtcccaggaacctgcacacccaccttgggggcactgcctctccttagggtgacctcagaggcagttgcagaagtttcnagttctgcaaaagccatctgtggcagaacaggagcggcagcttaccacatacaaactcttcaaatgttcccaccaactgtgacaggtgggggccactctgtagttgaagaggaaactaagactcaagcgtttaactttcctgaagttaacacagctagtcagaggcacagtttgcattcaagtccacatctatctagactccaggcctaagcgctgaccgttagtgctctatgaggcagcacctggtaaagccacctgtgctttgagggggcgttcaggaggctacagcctagttctgtgtagggtcagattatcttgttctttcttctc

SEQ ID NO: 5072 - DNA, 661 bp, Homo sapiens
  CDH1
  misc_feature [331]..[331]: Chromosome 16, SNP identification no. = rs2059254
  misc_feature [331]..[331]: allele = c, in linkage disequilibrium with rs11865026, respectively
  misc_feature [331]..[331]: n is a, t, c or g
gggtaacatggcgaaaccccgtctctactaaaaatacaaaaattagccaggcatggtggcacatgcctgtaatcccagctactcaggaggctgaggcacgagaatcgcttgaacccaggaggtgaaggttgcagtgagctaagatgatgccactgcactccagcctaggtgacagagtatctcaaaaaaaaaaaaaaaagaaaaaagaaaaaaagaaaaaaaagtttgtttatgtgaacataggaaaacaaacacaagccaatttaaatggtacctaagagcctaaaagtgtctgcctgtcagcagttcatctgagacaagcagtgttacngatttcttgtttccttctgaagatattctaagcctattccctatcccatttagctgtgtgctctttaaagacagattcttcccatattattacatatacacttacttgattcttttttaaacagctccctcattctttttattttatttattttttttgagatagagtctcgctctgtcacccaggctggagtgtagtggcatgatctggactcactgcaaccctcacctcccgggttcaagcaattctcaagcctcagcctcccttgtagctgggactacaggcacctaccaccacgcctggctaatttttgtatttttagtagagatg

SEQ ID NO: 5073 - DNA, 661 bp, Homo sapiens
  CDH1
  misc_feature [331]..[331]: Chromosome 16, SNP identification no. = rs7199991
  misc_feature [331]..[331]: allele = t, in linkage disequilibrium with rs11865026, respectively
  misc_feature [331]..[331]: n is a, t, c or g
agtggatgcccatcattgatttatccagccctctgtcaatgatgtgtctatcttttgccaccataaacaagattgtagtggccctccgtatatctgccctgatgcaatgtgtgagtccctctgtgagatgaagtcctaaaaatgggctttgctgaaagaaaggatttatgcatgtaaaatctataaacatgatcagaatgttctcttaaaaagccatactgattcctacttgccatgatgtccaaggccttggagccccacatctttgctggtacagttccgcctctgtgcattacagatgataaaacgaacccagaaaaaatgcaggggncttgcctgacattctccagagagaatctggtcatctgactctggtcaactgacatccagcattttttttttgctagaccagctgaccagcatccgccggcagcacccccttccctctcccatcatgtgtgggtcatcctcctttccaccgcccacatggacccctccctctggtctcctgcatcctgcatggtgttggttatgtgaacaagttctttagtggtgatttctgagattttggtgcacccatgattggagcagtgtacactgtacctgtgtacactgtgtagtcttttatccctcacccccttcccaccctttcccccaaagt

SEQ ID NO: 5074 - DNA, 661 bp, Homo sapiens
  CDH1
  misc_feature [331]..[331]: Chromosome 16, SNP identification no. = rs7198799
  misc_feature [331]..[331]: allele = c, in linkage disequilibrium with rs11865026, respectively
  misc_feature [331]..[331]: n is a, t, c or g
gctttgctgaaagaaaggatttatgcatgtaaaatctataaacatgatcagaatgttctcttaaaaagccatactgattcctacttgccatgatgtccaaggccttggagccccacatctttgctggtacagttccgcctctgtgcattacagatgataaaacgaacccagaaaaaatgcaggggtcttgcctgacattctccagagagaatctggtcatctgactctggtcaactgacatccagcattttttttttgctagaccagctgaccagcatccgccggcagcacccccttccctctcccatcatgtgtgggtcatcctcctttncaccgcccacatggacccctccctctggtctcctgcatcctgcatggtgttggttatgtgaacaagttctttagtggtgatttctgagattttggtgcacccatgattggagcagtgtacactgtacctgtgtacactgtgtagtcttttatccctcacccccttcccaccctttcccccaaagtccccaaagtccattgtatctttttatgcctttggatcctcatagcttagctcccacttatgagtgagaacatacaatatttggttttccattcctgagttacttcacttagaatactaatctccagttccattcttttttttttt

SEQ ID NO: 5075 - DNA, 661 bp, Homo sapiens
  CDH1
  misc_feature [331]..[331]: Chromosome 16, SNP identification no. = rs2961
  misc_feature [331]..[331]: allele = t, in linkage disequilibrium with rs11865026, respectively
  misc_feature [331]..[331]: n is a, t, c or g
agtctcagcttcttgggaggctgagggaggagaatcgcttgattctgggaggcagaggttgcagtgagccgagatcgcgccactgtactccagcctgggcaacagagcaagactccatctcaaagaaaaaaagaacaagactctgtctcaaagaatatatgttcatatttgtttatagttacatatagaactttaaaagacactaacaagtgagattttaggtatgggggaggcaccttattagaacaaagggagacagggtgggagtagaacttttcattgtatactttttagattatttttttttcaatggtgtccatgtgaacatatnacctattcataaagttaaaaataatcccttcttgcaatcacagtgcaaaaggcatgagggtgaaagtcatctgctaaaatgaccgaacaggagggtaggaggggcctgctcccgcctcaccctcctgagaaactgggattagagacaggaaacactggacctaggaacttataagctgttaaaaaaaaaaaaagaatggaactggagattagtattctaagtgaagtaactcaggaatggaaaaccaaatattgtatgttctcactcataagtgggagctaagctatgaggatccaaaggcataaaaagatacaatggactttggggact

SEQ ID NO: 5076 - DNA, 661 bp, Homo sapiens
  CDH1
  misc_feature [331]..[331]: Chromosome 16, SNP identification no. = rs1981871
  misc_feature [331]..[331]: allele = c, in linkage disequilibrium with rs11865026, respectively
  misc_feature [331]..[331]: n is a, t, c or g
cttcacttagaatactaatctccagttccattctttttttttttttaacagcttataagttcctaggtccagtgtttcctgtctctaatcccagtttctcaggagggtgaggcgggagcaggcccctcctaccctcctgttcggtcattttagcagatgactttcaccctcatgccttttgcactgtgattgcaagaagggattatttttaactttatgaataggttatatgttcacatggacaccattgaaaaaaaaataatctaaaaagtatacaatgaaaagttctactcccaccctgtctccctttgttctaataaggtgcctcccncatacctaaaatctcacttgttagtgtcttttaaagttctatatgtaactataaacaaatatgaacatatattctttgagacagagtcttgttctttttttctttgagatggagtcttgctctgttgcccaggctggagtacagtggcgcgatctcggctcactgcaacctctgcctcccagaatcaagcgattctcctccctcagcctcccaagaagctgagactacaggcatgcactaccatgcccagctaagttttgtatttttagtagagacacggttttaccatgttggccaggctggtctccaactcctgacctcaagcgatcc

SEQ ID NO: 5077 - DNA, 661 bp, Homo sapiens
  CDH1
  misc_feature [331]..[331]: Chromosome 16, SNP identification no. = rs9925923
  misc_feature [331]..[331]: allele = c, in linkage disequilibrium with rs11865026, respectively
  misc_feature [331]..[331]: n is a, t, c or g
acggttttaccatgttggccaggctggtctccaactcctgacctcaagcgatccacccacctcagcttcccaaagtgctgggattataggcgtgagccactatgcctgaccaagacagagtcttgttctgtggctcaggctggagtgctgttgtgcagtcgtggctcactgcagactcaaactcctgggtttaagtgatcctcccacctcagcctcccaaaatgctgggattacagggataaacttatttcttatccccttctttttagttacacaaaagatagcactgctttgcacttgcttttatcagcaaacaataatgtgtcttgangatcattcccctgcagagcataaagagcttttttttttttaataggttcatagtatttcattgtaaggaaattctataattgatttaaactaatcctctattgatggctatttgggctgtcgcccatgttttgctagcacaaacaatgccttagtgaataaccttttacatacgtcatttttgtgtgcaagctttccagtttcacatcggaaaatgggaacagtccaggtaaatggcccatggagcatttctgcaagagcagcaaccaggaaaataaaaggctggagaaccactgctggaacaggtgccccatctccttgtggtggtagc

SEQ ID NO: 5078 - DNA, 661 bp, Homo sapiens
  CDH1
  misc_feature [331]..[331]: Chromosome 16, SNP identification no. = rs9929218
  misc_feature [331]..[331]: allele = g, in linkage disequilibrium with rs11865026, respectively
  misc_feature [331]..[331]: n is a, t, c or g
ttgataatgaaaaatgatgctagcatccattaaaagagaaaaggcatcctcttgtgagctctattggacaagtgagcacttgttgtacagtcatctgcaagcacatgtgacctggagactgtgggaaatgcctcacttcgcagtgttggctcccagctgttctcttgggctgtttgagttttgttccaaaggtcagaggcagagggtccgagcctttccagcacagcccacatttgaaagtagtgcaagcctcacattcattctttgtagaaggtttccagatcttgttcttgagttattgaatgattcaaaggttctgaattccacaacngctttcctgtgtttttgcagccagattcagcacattttggtgtcagccagtgcttggaaaatgtggccctagattgatgcgtgtttatatctgggttgtgttttttatagagaataaatctgtggttacttttacccatcccacattgctgttaactacccctggaatttctctccctccgcaagcctagtgctgaagaacagaagctttggtgctggctggttctggggcgaatgttccttcagaggctgacctgctctgtgaccttgacaaggccctgaccttgagcaaatgacttaagcctttcgcctcagttgctcatcagcatta

SEQ ID NO: 5079 - DNA, 661 bp, Homo sapiens
  CDH1
  misc_feature [331]..[331]: Chromosome 16, SNP identification no. = rs9929239
  misc_feature [331]..[331]: allele = c, in linkage disequilibrium with rs11865026, respectively
  misc_feature [331]..[331]: n is a, t, c or g
ttgttccaaaggtcagaggcagagggtccgagcctttccagcacagcccacatttgaaagtagtgcaagcctcacattcattctttgtagaaggtttccagatcttgttcttgagttattgaatgattcaaaggttctgaattccacaacggctttcctgtgtttttgcagccagattcagcacattttggtgtcagccagtgcttggaaaatgtggccctagattgatgcgtgtttatatctgggttgtgttttttatagagaataaatctgtggttacttttacccatcccacattgctgttaactacccctggaatttctctccctcngcaagcctagtgctgaagaacagaagctttggtgctggctggttctggggcgaatgttccttcagaggctgacctgctctgtgaccttgacaaggccctgaccttgagcaaatgacttaagcctttcgcctcagttgctcatcagcattaagggggttaaaaacccctacctgcctcacagcaacataggagtcaatgtaaagttcacagtgcccacacgtaatgactgtcatagtgaatatttactctcaaaaagattttttgttttcagtttttagttgttgattttttttttttttaaatagagatgggatcctactatgttgccca

SEQ ID NO: 5080 - DNA, 661 bp, Homo sapiens
  CDH1
  misc_feature [331]..[331]: Chromosome 16, SNP identification no. = rs9929479
  misc_feature [331]..[331]: allele = g, in linkage disequilibrium with rs11865026, respectively
  misc_feature [331]..[331]: n is a, t, c or g
acaacggctttcctgtgtttttgcagccagattcagcacattttggtgtcagccagtgcttggaaaatgtggccctagattgatgcgtgtttatatctgggttgtgttttttatagagaataaatctgtggttacttttacccatcccacattgctgttaactacccctggaatttctctccctccgcaagcctagtgctgaagaacagaagctttggtgctggctggttctggggcgaatgttccttcagaggctgacctgctctgtgaccttgacaaggccctgaccttgagcaaatgacttaagcctttcgcctcagttgctcatcancattaagggggttaaaaacccctacctgcctcacagcaacataggagtcaatgtaaagttcacagtgcccacacgtaatgactgtcatagtgaatatttactctcaaaaagattttttgttttcagtttttagttgttgattttttttttttttaaatagagatgggatcctactatgttgcccaggctggtctcaaactcctggcctcaagtgatcctcccacctcagcctcccaaagtgctgggattacaggtgtgaaccaccatgcccagcctataactattgttttgttttgttttgttttttggagatagagtcttgctttatca

SEQ ID NO: 5081 - DNA, 661 bp, Homo sapiens
  CDH1
  misc_feature [331]..[331]: Chromosome 16, SNP identification no. = rs12919719
  misc_feature [331]..[331]: allele = c, in linkage disequilibrium with rs11865026, respectively
  misc_feature [331]..[331]: n is a, t, c or g
tgagccaccgcacccagcctactgttaattaagaattgtttatggcttctcttctctgcactttttcataaccttggcatttttgggtgcctggattctttcatttttgaaccataggactttgactgatggggtattcctcaagagaccctaatagctatatatttcttactggttcattgagatttaatttacataccacacaatttacccactgtaagtgtacagttagataatttttataaacgtacacagctgttgagctgtcatcacaatccagttttagaatacttccaccacctcccaagttcccttgggcctattggtagtnaagcctaactcagctccagacaacccttgatctgctttttgtctctagttttctagatttttcatatgaactgtgtactttggtgaacagcttctttcactcggtgtaatgcttttaaggttcatctatgctactgcgttttgtgatgtttgatcctttttattgctgagtagctataccatattttacccatcctaattactttttgggttgactgtatataagccacatttacacatttttttaaatgggtaaatgtgaaataagaagaaagttggggctgggcatggtggctcacgcctgtaatctcaacacttttggaggccgaga

SEQ ID NO: 5082 - DNA, 661 bp, Homo sapiens
  CDH1
  misc_feature [331]..[331]: Chromosome 16, SNP identification no. = rs12924033
  misc_feature [331]..[331]: allele = g, in linkage disequilibrium with rs11865026, respectively
  misc_feature [331]..[331]: n is a, t, c or g
ttgagctgtcatcacaatccagttttagaatacttccaccacctcccaagttcccttgggcctattggtagtcaagcctaactcagctccagacaacccttgatctgctttttgtctctagttttctagatttttcatatgaactgtgtactttggtgaacagcttctttcactcggtgtaatgcttttaaggttcatctatgctactgcgttttgtgatgtttgatcctttttattgctgagtagctataccatattttacccatcctaattactttttgggttgactgtatataagccacatttacacatttttttaaatgggtaaatntgaaataagaagaaagttggggctgggcatggtggctcacgcctgtaatctcaacacttttggaggccgagacgggtggatcacaagatcaggagttcaagaccagcctgaccaacatggagaaaccccatctctcctaaaaaaaacaaaaaacaaaaattagctgggtatggtggcgggcacctgtaatcccagctgcttgggaggctgaggcaggagagtcacttgaacgcaggaggcggaggttgcggtaatctgaggtcatgccactgcactccagcctgggtgacagagcaagactctgtctcaaaaaatgaatgaataaataaa

SEQ ID NO: 5083 - DNA, 661 bp, Homo sapiens
  CDH1
  misc_feature [331]..[331]: Chromosome 16, SNP identification no. = rs4076177
  misc_feature [331]..[331]: allele = a, in linkage disequilibrium with rs11865026, respectively
  misc_feature [331]..[331]: n is a, t, c or g
aacccaggaaacattcctgtggtcaggttgggcaactctaggaactgtttgcttactgattaaaaagaaaatcatcacattttcttcctcctttttctttctgttggattccccgaggttagggagaccccatgtactgaattccaaagctactaaatccctcctcctctctctccctgatgccccgtgcaggaaagggcagctgacaggcctgagatgtgggagaacaagtcctgggccctcacagacattggtaaggcttacattccgactggtgaaataaagcatgcaccaaaatgcctcctaacatcatttccattcagggtctaangtgctgcacagagactttcctgggttttttgtttttgtttttgtttttgagatggagttttgctcttgttgcccaggctggagtgcaatggtgtgatcttggctcacggcaacctctgcctcccgggttcaagtgattctcctgcctcagcctcccgagtagatgggattacaggcatgcgccaccatgcccggttaattttgtagttttagagatggggtttctccatgttggtcgggcaggtctcgaactcccaacatcatgtgatccgcccgcctcagcctcccaaagtgctgggattacaggcatgagccaccgggcccagcctcc

SEQ ID NO: 5084 - DNA, 661 bp, Homo sapiens
  CDH1
  misc_feature [331]..[331]: Chromosome 16, SNP identification no. = rs12599393
  misc_feature [331]..[331]: allele = c, in linkage disequilibrium with rs11865026, respectively
  misc_feature [331]..[331]: n is a, t, c or g
accattctcctgcctcagcctcccgagtagctgggactacaggcgcccaccaccatgcccagctatttttttttttttgtatttttagtagagacggggtttcaccgtgttagccaggatggtctcgatctcctgaccttgtgatccacccgtctcggcctcccatagtgctgggattacaggcgtgagccaccgcacctggccaaccgggctaactttttagattttctttttttggtagaaaatgaggtttcactatgttgctcaggctagtcttgcatttgtaaacataaaattaacattttctgctgagtatgaatgctcaataaanctgtaatgttactgatttcatgaatactcattaaaagaacacatgccagaatccccagtgtcatctaagaaaatagcctggaaggagatcttataggcagcagtatctgtggagatggagttagaaacactgtccctaaccagcaaaaagaaaaatgcctaactagctgaatgaggctgtctccccaggattcctttcatccatcaagttagatttctttttttttatttttattttaagagatggggtcttactatgttgcccaggctagtctcaaactcctgggctcaagtgatcctcctgccttggcttcgcaaaatggtgagatta

SEQ ID NO: 5085 - DNA, 661 bp, Homo sapiens
  CDH1
  misc_feature [331]..[331]: Chromosome 16, SNP identification no. = rs17715799
  misc_feature [331]..[331]: allele = a, in linkage disequilibrium with rs11865026, respectively
  misc_feature [331]..[331]: n is a, t, c or g
caaaacactgcttccaactagttacgtctaagatactaggttatcccactggttaccaaacaactcaactatggtttgctgccttccatagctggccctgtccttaaatcccaacatcgtctgaaaataatatagaagcttttgagactgtcttgtttctacccactcacattccagttatgggaccaggcgggcgtgggagaagaaacgggatcgtcaaagtgggactgttccgtgtggcatgatggcaatttcaagcaaggaatgttgctgaatgctcagagcctgccccaggaccaaaagcttttcatgaacttgggtttcatttgtntttgaacatcagtcatctctcttggggtcctctcttgaaagctacttttgcccagtaggctagaaagtggggcaccgtaggtttaatagcagcatgcagggatgacagagtattaaaaacactttttaaaagtcattcttactagtttttgtcatgaaaaaaaaaagaattcattctaattgtaacaggccaagtaatacaaggatatataaggaaaatatgttgttgttgttttcaaactgcctcctggccaggcacaatacttgtatctgtaatcccagcactttgggaggctgaggttggtggatcgcttgaggccaggagttcaag

SEQ ID NO: 5086 - DNA, 661 bp, Homo sapiens
  CDH1
  misc_feature [331]..[331]: Chromosome 16, SNP identification no. = rs2010724
  misc_feature [331]..[331]: allele = t, in linkage disequilibrium with rs11865026, respectively
  misc_feature [331]..[331]: n is a, t, c or g
taaaataggaatttcttttcaaactagcaaaaccagatgctcttcaaagagtcctcccccacccccagcagaagtaatggggcaactaggtcatctttaggggcttgtcatgtaaacagggaatgaaggctgcactgaattcctttctccagccttcccaaatttagacagtgaaagttgagacaagcatgattggacttgccaagggtggcggcctgaaaaaatgaaaatggttttgcaaataacttgatccaaggcacttaacctgctttggggcacctcatcttaatggtggttaagccctaccctttgagaagtgacagtatgacgnggagccccaacctgaattccaggtgctcataagactcattatctccccatgcaacctgatcccctgggctgattataggaaattgtaggaaagattgaaaggttcttcagctccagaaaggctctgggaagctcactgtcacgctggcaagggctgggttgtctctgagcccagcaagtgggaggaaagaagaatggcaaaatgttgaaactggaggatcagaatacggggactgggtatatttcaacatgcccataaaaaaagctaacaaaaataaagctaacaagggtctaagtgttctttaacccagtatgcccacctttcataaac

SEQ ID NO: 5087 - DNA, 661 bp, Homo sapiens
  CDH1
  misc_feature [331]..[331]: Chromosome 16, SNP identification no. = rs1075959
  misc_feature [331]..[331]: allele = a, in linkage disequilibrium with rs11865026, respectively
  misc_feature [331]..[331]: n is a, t, c or g
ctgcgactggattataaaaccagattctgccatgttcttgctgggtggccttagcaaattgctaaacctctatgggccttggccttctctactataacataaaggttatcaccactgtttgagtctacctctttagggttttgtgaagaccaagacagtgaatgggatgacattttctaagttaaaaagcaatgaaagtagaagagatgactattattcctgtgtatttgggtagacaagtgtttgttaactgaacagctgagccataagatgatgaaagaatcaagaagaaatgccaagtccttaaaggatgggcagataccatcctttnaagtctaaaataggaatttcttttcaaactagcaaaaccagatgctcttcaaagagtcctcccccacccccagcagaagtaatggggcaactaggtcatctttaggggcttgtcatgtaaacagggaatgaaggctgcactgaattcctttctccagccttcccaaatttagacagtgaaagttgagacaagcatgattggacttgccaagggtggcggcctgaaaaaatgaaaatggttttgcaaataacttgatccaaggcacttaacctgctttggggcacctcatcttaatggtggttaagccctaccctttgagaagtgacagta

SEQ ID NO: 5088 - DNA, 661 bp, Homo sapiens
  CDH1
  misc_feature [331]..[331]: Chromosome 16, SNP identification no. = rs1862748
  misc_feature [331]..[331]: allele = c, in linkage disequilibrium with rs11865026, respectively
  misc_feature [331]..[331]: n is a, t, c or g
cagccttcattccctgtttacatgacaagcccctaaagatgacctagttgccccattacttctgctgggggtgggggaggactctttgaagagcatctggttttgctagtttgaaaagaaattcctattttagacttaaaaggatggtatctgcccatcctttaaggacttggcatttcttcttgattctttcatcatcttatggctcagctgttcagttaacaaacacttgtctacccaaatacacaggaataatagtcatctcttctactttcattgctttttaacttagaaaatgtcatcccattcactgtcttggtcttcacaaaancctaaagaggtagactcaaacagtggtgataacctttatgttatagtagagaaggccaaggcccatagaggtttagcaatttgctaaggccacccagcaagaacatggcagaatctggttttataatccagtcgcagaccctgggtccagccctttttccttgtctctgtcttcccatcatttattacggctccccctgctcaccccatcctttccttcaagttgcggaagtgagttgtagacccagtctaagggctgagaaggtaggggttggggcatggtggtgattttttatttttattttttaaacaaactgggagggagggtcag

SEQ ID NO: 5089 - DNA, 661 bp, Homo sapiens
  CDH1
  misc_feature [331]..[331]: Chromosome 16, SNP identification no. = rs4783686
  misc_feature [331]..[331]: allele = c, in linkage disequilibrium with rs11865026, respectively
  misc_feature [331]..[331]: n is a, t, c or g
ttgcttgaacccaggaggcggaggtttcagtgagccgagatcgtgccactgcactccagcctcggcaacagagcgagactgtctcaaaaaaaattaatagtaataataattaaaaaaaaaaaaaaaaccaaggttggctgggcacactggcttatgcctgtcatcctagcactttggaaggccgaggcaggaagactggttgagtccaggagttcaagaccagcctgggcaacataacaagatcccatctctatgaaaatattatttaaaaaaaaaaaaaccaaggccttaatagggtctctccagagagaggaagagccaaccatgagantaacccatgttaaagggctgtctcagctctgccatttaatagttacaggatgtcaggtaaatttcttaacctctgtgagcctcagtttcatcttcaaaatggagaaaatctgttacttcccctctcacccccaaacgtggtcttatttttctctggcaagggcagggctattggcttcagaaatgtttgcaagggtggcccctgatggaagaaatgaaaactgctgcctaggcgtcagggatggcttcaagggctttctggcagaaacctgatcctcctgtctagccttgtaagataggacggcaggaatttttataaaagagaacttgg

SEQ ID NO: 5090 - DNA, 661 bp, Homo sapiens
  CDH1
  misc_feature [331]..[331]: Chromosome 16, SNP identification no. = rs2011779
  misc_feature [331]..[331]: allele = a, in linkage disequilibrium with rs11865026, respectively
  misc_feature [331]..[331]: n is a, t, c or g
ggaaagggggaacctgggctcttgatgactatcaagtctccatactgggcacagcttaccctagggcttccttaacttgaggaataaaccacgacataaaccacgacaattggagatttatataacatgcacttgaacccaatcatgatacagcagacatggaggcagaaacaaagttcaagagatgtggaagaaaagttgaagacccaagctcaaaactgtccctgcagccgggctcagtggctcaaacctataatcccagcactttgggaggctgaggtgggcagatcacttgaggtcaggagttcgagaccagcctggccaacatgangaaacccatctctactaaaatccaaaaatcagccaggcatggtgatgggctcctgtattcccagctacttgagaggctgaggcagaagaattgtttgaacccaggaggcagacgttgccgtgagccgaaattgcaccactgccctccagcctgggagacagagcaagaatctgtctctaaaaaaataaaactgtctctggatcataagaggcttccacacacagctgcctggcaaggactcactgtgctgagtttttttcacatgaatgatggggacccttggagactttgagtcaaggagctaagttaatatggtcctatagtattaga

SEQ ID NO: 5091 - DNA, 661 bp, Homo sapiens
  misc_feature [331]..[331]: Chromosome 16, SNP identification no. = rs1493892
  misc_feature [331]..[331]: allele = g, t
  misc_feature [331]..[331]: n is a, t, c or g
aaatcaaggctatttccctttaactcttttaaaggacaggggtagagaccaacaatggagtaagaactctcggtatcaagtcccagttgttcctgctaaatccatgctgcatgacatttggcttctccaagcatctgttccctaacttagcaaatggaagtaatatctcttccatagcttttcaaaagctggccattgtaataaaaaataacccaaatcaagtcattaacgactttatctataaatgacctaatggaggtccacaaagagcttaccagaacttttgtgtcacattgctggtgcacgttccaattgtgggaactcatctggntgtagactccttacatggacctcttcaggtattgctagagtcatcaaattcaggctttgccaatacttttttcccccagttttcaaaatagtcatcaaagttatgtgttaaccaagtcatatacatgcacatctacacgtttgtttctgagttacagtaaagctataggataatttgggcatgaaaacaatttctacatgaccttgccagaatagacgagacattgtgcaaagcaatgagtatattgtcgtcatctaatttgcttaaacaatctaacattatattgctcaacaaggaatcctttgtacaacctcttagagtgtgcaaaat

SEQ ID NO: 5092 - DNA, 661 bp, Homo sapiens
  WWOX
  misc_feature [331]..[331]: Chromosome 16, SNP identification no. = rs1813526
  misc_feature [331]..[331]: allele = c, t
  misc_feature [331]..[331]: n is a, t, c or g
ttggaacctgagaaatggtctgttccagtgagctctgtatggaaatccacacacctaactcagacatgcccgatttgaaatagcggggctggacattgggggcctacctgtgagatctgaattattgcaaagtacatcctcttaatttgtttctggaaggcagagttaagagttaattccttcccatgatgtggccccagcggagaccttgtgtttttttttttttttttcttcagtgctttttcaggactatgttatagaatacttatggggcatacgtgtaaatgaactgtcaaccttaaaatctaaacaaacagcttgtttgtggttngtcctgaaatcctccctgctcacaaaacagccagctacttggttttctaaaagacgtaattttgcaggcagacttcgtagagccattctgtgcagaagaagggaagggagaagctgtttgttttacctgtagtatgaagatattctttgcgctgttagaactgagctcattaattctgcctggcaataatttcaaaggtttattttggtgtagatggcgaatacagatgcatacatttatacgcagtacacgagctagctataaccataacagaggttaaagaagtagagtaaaaatgtaaaatgtttcaaataaacacacactaaatat

SEQ ID NO: 5093 - DNA, 661 bp, Homo sapiens
  WWOX
  misc_feature [331]..[331]: Chromosome 16, SNP identification no. = rs1553723
  misc_feature [331]..[331]: allele = g, in linkage disequilibrium with rs1813526, respectively
  misc_feature [331]..[331]: n is a, t, c or g
ggggcctacctgtgagatctgaattattgcaaagtacatcctcttaatttgtttctggaaggcagagttaagagttaattccttcccatgatgtggccccagcggagaccttgtgtttttttttttttttttcttcagtgctttttcaggactatgttatagaatacttatggggcatacgtgtaaatgaactgtcaaccttaaaatctaaacaaacagcttgtttgtggttcgtcctgaaatcctccctgctcacaaaacagccagctacttggttttctaaaagacgtaattttgcaggcagacttcgtagagccattctgtgcagaanaagggaagggagaagctgtttgttttacctgtagtatgaagatattctttgcgctgttagaactgagctcattaattctgcctggcaataatttcaaaggtttattttggtgtagatggcgaatacagatgcatacatttatacgcagtacacgagctagctataaccataacagaggttaaagaagtagagtaaaaatgtaaaatgtttcaaataaacacacactaaatatcttcttttatatcttataaacacccagcagtcctttagcacgggcatcaaggtggcccagttggaaaatttcagtgacatgccatcagatttgttcca

SEQ ID NO: 5094 - DNA, 661 bp, Homo sapiens
  WWOX
  misc_feature [331]..[331]: Chromosome 16, SNP identification no. = rs2016545
  misc_feature [331]..[331]: allele = c, in linkage disequilibrium with rs1813526, respectively
  misc_feature [331]..[331]: n is a, t, c or g
ctatgttatagaatacttatggggcatacgtgtaaatgaactgtcaaccttaaaatctaaacaaacagcttgtttgtggttcgtcctgaaatcctccctgctcacaaaacagccagctacttggttttctaaaagacgtaattttgcaggcagacttcgtagagccattctgtgcagaagaagggaagggagaagctgtttgttttacctgtagtatgaagatattctttgcgctgttagaactgagctcattaattctgcctggcaataatttcaaaggtttattttggtgtagatggcgaatacagatgcatacatttatacgcagtanacgagctagctataaccataacagaggttaaagaagtagagtaaaaatgtaaaatgtttcaaataaacacacactaaatatcttcttttatatcttataaacacccagcagtcctttagcacgggcatcaaggtggcccagttggaaaatttcagtgacatgccatcagatttgttccatgtagaaggacgacactatcagttagatgcttattttgttggcaaatttctatggcacttctgcttggctatttcaaaccaaccatggaagaatagataccccaatgcgatgtttcatccctattcataaagaaactgtactttgagcaat

SEQ ID NO: 5095 - DNA, 661 bp, Homo sapiens
  misc_feature [331]..[331]: Chromosome 16, SNP identification no. = rs7196036
  misc_feature [331]..[331]: allele = c, in linkage disequilibrium with rs13335346, respectively
  misc_feature [331]..[331]: n is a, t, c or g
tttagtcatctttgctgataagaaaagggaaggaaattgaagactcaacagaagacactcccatctgtgcaaaatcaaacccatatcaacaagggaggcatgtgaacctttatcttggcatctgctgggccactaggagaaggatgtcactggttaacttcatatttacctttgcattattaagctgtgagccagggtccttctaatacacacaaatatcccaagcctcatccagaaagtaggcaaaatctgcaaaacaaacccaggccaacttcaaattgcggagtcatcaacgcatgagccaggctgccatcagcaacatagaaccagngtttactcagttccagaggaattttatttcagcttgggagcttcagtccatttgccttacaaatgccaccattatgtgctatttgaggtttgaatgatgccacacaaggagacactccatgtgtacctgcctcttctacaaactgaagaactgtcagaattccagcagagggaatcagttttggtagatggggtaaagtgaggaaaggaaagaaaactaaccaagccccaggcactatgttagctactccaagtgcattattttactcaatcctgacagcagttctgtgaacaagactattctcccattttacagatgtggaaactgagg

SEQ ID NO: 5096 - DNA, 661 bp, Homo sapiens
  misc_feature [331]..[331]: Chromosome 16, SNP identification no. = rs7203273
  misc_feature [331]..[331]: allele = c, in linkage disequilibrium with rs13335346, respectively
  misc_feature [331]..[331]: n is a, t, c or g
tctcgaccacatggaacttatattccaagacggtattgtgtgatcaatgtgtaactgaggtagtaggaccaaagaggcaggagagagagttgccttttagtgaaaatggaagtactgaaatcaccacattctgagtttatttcctgcctctcccatctactagctttgagacccgtagaaagttacatgacctgtctgagtttcaaatcctccacttgtaaaatgcgaataatactactcacctcttgggttattgtaaggataaaataaagtaaaaaacaaaaaaggtgaattttttgatgtagcctacagtcattcatcaaaacatgcntgttgtcttctgttttcaggcagatactgggcatccctagtgagcatctgtgccacaggctggaatgcagtggcacgatctcagctcactgtaacctccgcctcccaggttcaggggattttcctgccttagcctcccgagtagctgggattacaggcacatgccaccacatccggataatttttgtatttttagtagagatggggtttcaccgtgttggccaggctggtctcgaactcttgacctcaaatgatccgactgcctcagcatcccaaagtgctgagattacaggcatgagccaccgcacctggcctgtgccagcctttgtca

SEQ ID NO: 5097 - DNA, 661 bp, Homo sapiens
  misc_feature [331]..[331]: Chromosome 16, SNP identification no. = rs4130728
  misc_feature [331]..[331]: allele = c, in linkage disequilibrium with rs13335346, respectively
  misc_feature [331]..[331]: n is a, t, c or g
tcggtctccccactccacatttcagttttgcagctggctctaggttgggctctgcggatagatggggctagtggcagactgcaggataatgtagggagaagggatttcggccttctcttggcttctgttcctcacagcctcacttcaccttggcagtaatacttcctccttgcagcagctgttgactccaggctccagcctagaccaattcatacctctgtggaagtgccaacaccaacaggaagacccttttctcagacctctgggtctcagctccaagggaccctgccatgagccacaagttgggaggcaactcagaggtctgagcctnggccctaccaggcctctccactgagcttctgaattctgatataccttatatcaccctagagctgtcagctgcatcctacagctattactgaggtatggcctcagtgttccctttttttgccttttaaatcttccagtaactgtacaaacaagttcttttattaaattatttagctaaaacacctaatgtgtatttgtattttcctaactgcatcattgctgaaacaaagggtgagggccaaagattgtcacaactcatccaaggaacttcatcctttctcttattcagtcctatagcagcttgcttcttcccagaggattcaacaacaac

SEQ ID NO: 5098 - DNA, 661 bp, Homo sapiens
  misc_feature [331]..[331]: Chromosome 16, SNP identification no. = rs11150229
  misc_feature [331]..[331]: allele = c, in linkage disequilibrium with rs13335346, respectively
  misc_feature [331]..[331]: n is a, t, c or g
cacttcaccttggcagtaatacttcctccttgcagcagctgttgactccaggctccagcctagaccaattcatacctctgtggaagtgccaacaccaacaggaagacccttttctcagacctctgggtctcagctccaagggaccctgccatgagccacaagttgggaggcaactcagaggtctgagcctcggccctaccaggcctctccactgagcttctgaattctgatataccttatatcaccctagagctgtcagctgcatcctacagctattactgaggtatggcctcagtgttccctttttttgccttttaaatcttccagtaantgtacaaacaagttcttttattaaattatttagctaaaacacctaatgtgtatttgtattttcctaactgcatcattgctgaaacaaagggtgagggccaaagattgtcacaactcatccaaggaacttcatcctttctcttattcagtcctatagcagcttgcttcttcccagaggattcaacaacaacaacactctctctcattctctctctgtctctctctctctctcacacacacacacacacacacacacacacacaccagcaacatgcctgtttcttgcctcagtcttctatccagaggctctctaactcagccccatctaaag

SEQ ID NO: 5099 - DNA, 661 bp, Homo sapiens
  misc_feature [331]..[331]: Chromosome 16, SNP identification no. = rs6564714
  misc_feature [331]..[331]: allele = g, in linkage disequilibrium with rs13335346, respectively
  misc_feature [331]..[331]: n is a, t, c or g
caacatgcctgtttcttgcctcagtcttctatccagaggctctctaactcagccccatctaaaggccagactagaaacctcctccatccaggtccctttgtggccctttccacaaacccaaactcccctttgcagccacggacaagatgaactttctgtactgaaattgctggtctgggtcaggaaactttcttagtaaagtaagccttaaagaaatccagctaattctaaatagcttaagacttttggttttacctctgctggtccaaaatgcgttattacgtcaatacatggaagaaaaagctgtattacacacagcagagcctggtanatagcatctattaaaagctgaaacttcagccagccctattaaaacttcaaggtagtgggtgtggcatttctttagttttgttttgttttgttttggttttggtttaatttagcagaggtaggatttgagcccagggctgtcgtctgctatcaatggtcaatgcaccccccattatgtaattattcaggaccactttgcaatcatctgaccttcccaggccatttgcaatgtccttaactgcctctttgtttccctgtgttttgcatttttcttagaatgcctcattcttctcctgcgcttatccacactcacttgttcattaagaaccaa

SEQ ID NO: 5100 - DNA, 661 bp, Homo sapiens
  misc_feature [331]..[331]: Chromosome 16, SNP identification no. = rs6564715
  misc_feature [331]..[331]: allele = a, in linkage disequilibrium with rs13335346, respectively
  misc_feature [331]..[331]: n is a, t, c or g
tggaaaaaataaaatatgaaaatgtattttttatgaatgtattttctaaatacgtttcagaaataaatgaagtatgacgggaaactgtacatgaaaagattgggtacgtgaaaagatgatctctatattcattaactcatgtaaacataattcttttataggtaagagctttctgcttggaatttcttcctccatgtaaattattcaatagcattaatgattgcaagtaaagtttatttttccaatataaaaacaatttttacatttccattaaaacatattggaaaaacaccaaaaaagaaagaaagaaacataggctgcaaagttttancatctaaagacaaccacaagtaggacctgcagtaacttttcatacttatctttcatacagctggcacaatgacaataagttgcgcatgcacatataccctgccttcactactaaatacatattccatatttttagaaaatatgtgcaatttatgatttaaaatattagttgtcagaaaagcactgaaatagataataactacagatttccatttctgacttacacaaaataacagggaacagatgtatcctctcaccttaaataattagaaaaaaatttaaaatttttaaaaacatatacattgtttttctaatcactttctaatgattt

SEQ ID NO: 5101 - DNA, 661 bp, Homo sapiens
  misc_feature [331]..[331]: Chromosome 16, SNP identification no. = rs6564716
  misc_feature [331]..[331]: allele = g, in linkage disequilibrium with rs13335346, respectively
  misc_feature [331]..[331]: n is a, t, c or g
ctacacttaattaatctactacaaaatttccacacatacaaagaaacaggaaaatatgacctgtaaccaggaggaaatcaatcaattgaggcagacttagaaataattgctactatgaactgttattataaaacaattactattaaaagattccatatgttcaagaaggtaaaggaaaatatgagtatgatgaatagagaaattgaatgttacattaaaaacagaacttccagaaatgaaaattacaatatcttaaatgaaagaaaattaagattaacagaatagacactaaagaagaaaaacttaatgaacttgcagatatagcaatagnaagtaaacaaatcagaaaagacatggaaaaaaataaacagtggaaaagtaaggtataataaaatataaagtaatctaatatacaaataactgaagtccaggaaaaagatgaagaaaacagaaaaaaaaataaaacaatatttgaaaattctacaaacttgatgaaaatcataaactcacacatacaataagttcagtgaacctcaatcaaaataaccccaaagaaaaccacaccaaggtacatcagtatcaaatggctgaaatctagaaatagaaatagaaccttaaaaaatccaaagaaatatgacacattatatacagaagaaaaaga

SEQ ID NO: 5102 - DNA, 661 bp, Homo sapiens
  misc_feature [331]..[331]: Chromosome 16, SNP identification no. = rs11150230
  misc_feature [331]..[331]: allele = g, in linkage disequilibrium with rs13335346, respectively
  misc_feature [331]..[331]: n is a, t, c or g
atctagaaatagaaatagaaccttaaaaaatccaaagaaatatgacacattatatacagaagaaaaagataaaaattacatgagtctctttgtcagaaattttaaaaaaagataaacatttggattttcacaaattaatggagagtataagaaattttaaatgtaaaaataagtattttctcattttaaaaataactgactattcaaagcaaaataacaactttattgtgggatttacacaaataaggtatattacaaaaacagcacaacaggtgagtgggaaaaataagttttatagttgtaagggtgttatactatacatgaagcagtntaatatttgaaggtaggctgtagtttttatatatactatgcatatacggtattacacagtatatatatgcatatatatagtattttatatacagtatacactatatatagtattttatatatagtcttacaccctacccttaaatatgataccactacatatctatacatgtacgtagtactatacttcatatgtatgtttttatgtataaagtatgtatacgctgtaataccatatatacatatagtacaacaacttcttgaaagggaaataaacaggtagaacaatatgccataatagagataaaatagaatgttaaaatactcaatt

SEQ ID NO: 5103 - DNA, 661 bp, Homo sapiens
  misc_feature [331]..[331]: Chromosome 16, SNP identification no. = rs12445463
  misc_feature [331]..[331]: allele = t, in linkage disequilibrium with rs13335346, respectively
  misc_feature [331]..[331]: n is a, t, c or g
catttgctttaaagaattggctcatgtgattatggaagctggcaagtccaagcagatggcaggctggaaacacaagaagaaacgatgcttcaatattcaatctaaaggcagtgtggaggcagttacttcttcagtggggtacctcagtctttccccttaaagccttcaactgattggatgacgcttatccacgatatagagggtaatttgcttactcaaagtctactgatttaaatattaatcacatctcaaaatacctacacagcaacatctaccatggcatttgaccaagcaactggaaccatagtatagcttatctgacatataaaanaagccatcacacctgattatatgtttctaacactgtaaacatgaaacacacataggtaaaaacaaaaggatggtataagatgtattgaccaaacagtaattaaaagaatgctggagagactatataaatttcagaaaaattagacttctgaacagagaatatgactaggaataataaagcggattttatatggtgaaggggggcaattcatcaacaggacatagcaactctaaatgtatatgaacctaatggagagcttcaaatttcataaagctaaatatggtatcactaaaatgaagaattgacaagtccacaattatatttgtagac

SEQ ID NO: 5104 - DNA, 661 bp, Homo sapiens
  misc_feature [331]..[331]: Chromosome 16, SNP identification no. = rs12445495
  misc_feature [331]..[331]: allele = t, in linkage disequilibrium with rs13335346, respectively
  misc_feature [331]..[331]: n is a, t, c or g
gtctttccccttaaagccttcaactgattggatgacgcttatccacgatatagagggtaatttgcttactcaaagtctactgatttaaatattaatcacatctcaaaatacctacacagcaacatctaccatggcatttgaccaagcaactggaaccatagtatagcttatctgacatataaaataagccatcacacctgattatatgtttctaacactgtaaacatgaaacacacataggtaaaaacaaaaggatggtataagatgtattgaccaaacagtaattaaaagaatgctggagagactatataaatttcagaaaaattagacntctgaacagagaatatgactaggaataataaagcggattttatatggtgaaggggggcaattcatcaacaggacatagcaactctaaatgtatatgaacctaatggagagcttcaaatttcataaagctaaatatggtatcactaaaatgaagaattgacaagtccacaattatatttgtagacttcgagactcctgtctcagtaaatgataggatgagttgacagaaaatcagtaagaatggagaacacagaaacaaccctatcaaccaacttgacttccttgacatttgtagaacactctactcatcaacagcattatacacattctt

SEQ ID NO: 5105 - DNA, 661 bp, Homo sapiens
  misc_feature [331]..[331]: Chromosome 16, SNP identification no. = rs12448083
  misc_feature [331]..[331]: allele = g, in linkage disequilibrium with rs13335346, respectively
  misc_feature [331]..[331]: n is a, t, c or g
ttgaccaagcaactggaaccatagtatagcttatctgacatataaaataagccatcacacctgattatatgtttctaacactgtaaacatgaaacacacataggtaaaaacaaaaggatggtataagatgtattgaccaaacagtaattaaaagaatgctggagagactatataaatttcagaaaaattagacttctgaacagagaatatgactaggaataataaagcggattttatatggtgaaggggggcaattcatcaacaggacatagcaactctaaatgtatatgaacctaatggagagcttcaaatttcataaagctaaatatgntatcactaaaatgaagaattgacaagtccacaattatatttgtagacttcgagactcctgtctcagtaaatgataggatgagttgacagaaaatcagtaagaatggagaacacagaaacaaccctatcaaccaacttgacttccttgacatttgtagaacactctactcatcaacagcattatacacattcttcttcagcgcatatgaaatatttgccaagtaaaatgatattcgaggctataaaacaagatttaataaatttaaggcaattttaatcatgtgaaaggttttatttggctacaataaaattaatgaataataacagcaga

SEQ ID NO: 5106 - DNA, 661 bp, Homo sapiens
  misc_feature [331]..[331]: Chromosome 16, SNP identification no. = rs6564717
  misc_feature [331]..[331]: allele = g, in linkage disequilibrium with rs13335346, respectively
  misc_feature [331]..[331]: n is a, t, c or g
ttaatgggccaaattttatttaaccattttttagttattggaaatttaatttgtttacgctttttctgtaacataaacgatgctgtgataaatacctttgcacataaggggttttttctctcatattttagagcagcaattttatggtctctgtgggggctttgaataaaataaactctttctgttctaggaaaatatggttcaagatacttggttgcctggagccactgaattaatcagtaaatgatcatggacaaaatagagatttccttcgcagccctgggctcctataactgatataaaaatgatgagagtgaacattaaggaaatncttctatgtattaggaatgttaatataaagatgtgattagaaggcacagagaagttaagtgagttgtgccaggaaacacagctagtaagtgacagagctgggatcggggaccattccggcttccactaaactgcctcttgatgttagctaatacatttttgtaagcaattccactaagataatgtccacatggaggcgtttttagagcaaaattaatctcttaccaacattttccttcttgtattttctttctcttattgggcactaggaagctcttccattttactcagaagactttgtggcaatgggctaaaaaataacgagagctta

SEQ ID NO: 5107 - DNA, 661 bp, Homo sapiens
  misc_feature [331]..[331]: Chromosome 16, SNP identification no. = rs4889045
  misc_feature [331]..[331]: allele = t, in linkage disequilibrium with rs13335346, respectively
  misc_feature [331]..[331]: n is a, t, c or g
gagagcttaaataatcaaaagaagaatgtgttgcagtcaaaatcctaagaaaaagtgatctagcgccagggcctaataaatccctcctgcgatgggcttcaaaaactggccgcgatggagtgctgacataaatcctctgtggatgtacagctgacatttccctgcatcgtgacacatcaggaggacaaatggtgtaaatcctcctgttggaattggtgcattgtctgtgtgcacagcttacttttctgagtcccatcctattatatacaaaacttgtttcagacacctgttccccagacagaacttcgaactgcctgcaatgtcttgaatnagcagagatgatttcaaggaactcacatcttcataagcttctgctgctaccctcgtcctgtttttctccataatctcatccactctcatggttttgcatacttactttctctctttccagcaaaatatccagccaaagtccgtcttggatgttcagacctatacatctctgtcttcccccatctcctgttagaagtttataatcatcatacattttacataagccaaagaatgctcataatttttacattctaactctagcctgcttctctcctatcttctcccatttccttgagtggtatcactaccactaatgttactcaggtcaaaa

SEQ ID NO: 5108 - DNA, 661 bp, Homo sapiens
  misc_feature [331]..[331]: Chromosome 16, SNP identification no. = rs4889046
  misc_feature [331]..[331]: allele = a, in linkage disequilibrium with rs13335346, respectively
  misc_feature [331]..[331]: n is a, t, c or g
attgtctgtgtgcacagcttacttttctgagtcccatcctattatatacaaaacttgtttcagacacctgttccccagacagaacttcgaactgcctgcaatgtcttgaattagcagagatgatttcaaggaactcacatcttcataagcttctgctgctaccctcgtcctgtttttctccataatctcatccactctcatggttttgcatacttactttctctctttccagcaaaatatccagccaaagtccgtcttggatgttcagacctatacatctctgtcttcccccatctcctgttagaagtttataatcatcatacattttacntaagccaaagaatgctcataatttttacattctaactctagcctgcttctctcctatcttctcccatttccttgagtggtatcactaccactaatgttactcaggtcaaaaacaaacaaacaaaaatgttaattggacctgttatttccttttcctcacgtgcagtcaaacgtgagctgcattgatcaaatccccaacttctgtctcaatctgactgcccatttctgtctctactgcccctgcccttgtcttagtcaccctcccctcttgcctacacctctgcagtagccatttgatggatgtgccacatcccttttcatgtctcctaca

SEQ ID NO: 5109 - DNA, 661 bp, Homo sapiens
  misc_feature [331]..[331]: Chromosome 16, SNP identification no. = rs4243186
  misc_feature [331]..[331]: allele = c, in linkage disequilibrium with rs13335346, respectively
  misc_feature [331]..[331]: n is a, t, c or g
ctggatctaaatccacctctattttacaccaatgtctgttttctttcaagaaaaaatatgtccaggcactggttcaattttcctctggttatttatacaaataacttcgtcttcagggcaactgccaacacatcatagttaagcaacaaagttctttgttttttaaagggtatcatgtattatacaaagataattctctggttcctcttgagacgtttatagtctagctgaggacaaattaatactcatgaattagtaagaaaaccttaagtactaagatttctgtgctcagtaacccaacacagacctcagaagagggagaaatgagggntgcaggaatctgggcaggcccctggtaagaggatcaccctgcattggaatcccattctccttgtaccagctgtgtgagcttggccaggtttccacacttccctgagcctttgtttcatgaataaacgtcttctctcttggtgttctgcagaggagtaaatgaggcaagtggcaatgtctggtatggtactgggtaggcacaaaatcgatgccaatccctcctttctttccctttgattaagcttttcactactgccaaggctaatgaatagaccagggcattcatcaacactcaggtgtgtgtcctgtgtgtatccttcagaaaactcac

SEQ ID NO: 5110 - DNA, 661 bp, Homo sapiens
  misc_feature [331]..[331]: Chromosome 16, SNP identification no. = rs4264404
  misc_feature [331]..[331]: allele = g, in linkage disequilibrium with rs13335346, respectively
  misc_feature [331]..[331]: n is a, t, c or g
catcttggaataacttctccccctactactgtcattactatacctaacaccagcatagtattacagctactatgattaccagtattacaacaactaccactaccaccatcctattttaactcctactgatcctactactacaactaccatcaacaccaccctaccgcaattcttcctcttgatattactactgctaatatggtaactaccatcaccaccagcctgcaacttctcctccttttcttcccatgatgatgaccaccactaccctcctagtaatactactagtagtatctatgacgtttttttaatgcttactaagaaccaatcnttgtgctatacactttgcatgtatttttcattcagccatcataaccattttgtgatatatatgtttatatcattttcatctggtggatgagtcaataacagcttacagagctgaaatgagagtcccaaggccccaccttggaactcacactagcgctctctgatctccaggcctgtgccctttctaaacctccatgctgcttccagccaccctggcttggacaattgtgtttctgatttttctctttttccaaattcttgtgcatggagatgggaagtccacccagtagggaaggacaatgactggacacagggctccagagtaaacagg

SEQ ID NO: 5111 - DNA, 661 bp, Homo sapiens
  misc_feature [331]..[331]: Chromosome 16, SNP identification no. = rs9938511
  misc_feature [331]..[331]: allele = t, in linkage disequilibrium with rs13335346, respectively
  misc_feature [331]..[331]: n is a, t, c or g
ggctccagagtaaacaggaagctcacacaaagcatccagctggctgggcagcttgtctactgaccttggcctcactcatctatcctccccacatccccttgaaaaagtatgtccacacctgagataatctgtgcactgacattcccaggtagctgtttgctgccacctggatgaccacagactggtttgaaactgacatgcagatcaaagacagtggataacaaggtgtcttttattcactcagaatctttgttgcctgggtcctctttaccctccaacctcacccatgcagcaactgaacaagcgcattctgtttgtctctggaaaattnaaaaaaaaaaggccttgcctgcccatccttaactctatagcaattattcttcatgtcacaaatataaagggcaaaaccactggaggatgcacacattcatgcattcagttaaataatcatttttttcaatgaagatttagaaagaatataaatcatgctggagcagtaatgttgaacaagatgaagctttcttcattcctgaagctcaccttgctctcatggagaatatagaaacaatagctagtcctcaaccactgagacgtcttaccatgtggtcctccctttaagtcgagaaaggtctctcttcagtgactcgctttatgacatcat

SEQ ID NO: 5112 - DNA, 661 bp, Homo sapiens
  misc_feature [331]..[331]: Chromosome 16, SNP identification no. = rs4545828
  misc_feature [331]..[331]: allele = t, in linkage disequilibrium with rs13335346, respectively
  misc_feature [331]..[331]: n is a, t, c or g
ctcctactctgactcataggtatgagatgtttatcttttcatttagaggagtcatttagatgcagattcactgtgagggattgtgtgtgtgtgtgtgtgtttgtgtcatctttggtcttaaggctcagttcaaatcctggctttgtaatgtgaggtctgtgatgtaacctgtttgagccatagcctcttactctgtaggatgacaaaaattgttgcacccaatttgtaggattgtgaagagggttaggtaatataattccagataatgtgagaagcagggtcacctcactgaagccaatgaagcttaagctttgaggcctttctcttgcanaggctctttccaagactctggaaacatttaacgtttgtagtatttaaagcttgataaaatttatagtcttctcagtctcaataaatatttactttcatacctaatttttgtgttatttttcctgaaaagagtcctcaaaacatttgatcttcaggccccataaaacctgtgcaatatttagctcaagacctggcatatggacagcaattactaaatgttagatgataacaattcatttaatttttctagaactttttaagaatttttatattaattaactaaaatcatggagacaaaagaaaagaataaatgtcctgataattatcaagg

SEQ ID NO: 5113 - DNA, 661 bp, Homo sapiens
  misc_feature [331]..[331]: Chromosome 16, SNP identification no. = rs4132185
  misc_feature [331]..[331]: allele = c, in linkage disequilibrium with rs13335346, respectively
  misc_feature [331]..[331]: n is a, t, c or g
gcctctcagactccaattgtgagaaacaatggagagacacacacacagctgaatacactctgcgtgggtgggaggtgcgactgggccccttggtaacggtcctcaaagggattactaatggaaacgtccagatagatggatctatggaaaaatatctaactgggcaggacatcgatgattagaaatccttctctttctctcactaccaatgcactcattgtctttctctattttggggactttaaacaaatcctatgactctagccacaaggcaccagaatatcgaatgaaaagcccaccagttattaacttcctgtagaagtgaaaatcntatttttcaaacaacatcactaataacaataataataaccttgataattatcaggacatttattcttttcttttgtctccatgattttagttaattaatataaaaattcttaaaaagttctagaaaaattaaatgaattgttatcatctaacatttagtaattgctgtccatatgccaggtcttgagctaaatattgcacaggttttatggggcctgaagatcaaatgttttgaggactcttttcaggaaaaataacacaaaaattaggtatgaaagtaaatatttattgagactgagaagactataaattttatcaagctttaaatact

SEQ ID NO: 5114 - DNA, 661 bp, Homo sapiens
  misc_feature [331]..[331]: Chromosome 16, SNP identification no. = rs10514470
  misc_feature [331]..[331]: allele = t, in linkage disequilibrium with rs13335346, respectively
  misc_feature [331]..[331]: n is a, t, c or g
tctgtggctgtttatttattcaagagatgcttatgcagccactaatttaatgaataattatgctttttaatggatatttgttaaatttctactgtatctaaaacacagacgtgaaacttcacagcagctacattattgccaccatgagcccacgaatctcaggaaagtccctggtcgccatttcaccttcatagaaaggccatgtgcttcacctactttatcccatgtggcctcacagcctctgtgaggtggaagaatgttctggaccatgatgagtctctctgttaacgttttttttttgtcttttacagagcaggcatggagggtcttntatttccaaagctttatacacaatgctcaaaataaaaaagacaaagaagacatgacttctataaaagccttataccccagaggcatgtcagacactctgggactgaaacttgaattttggagggaagtggggattaagatgaatgatgaataaatgaatgaacgaatgaatggatgaatgaatcaggctacattttggagccagacatctgtgcctgatctagaaagtaagtcagacagagaagacttctaagaacaagcagaatctcaccaggcagctcaatctggctgcaaacattggattcctcatgaatgcgggacttaattatca

SEQ ID NO: 5115 - DNA, 661 bp, Homo sapiens
  misc_feature [331]..[331]: Chromosome 16, SNP identification no. = rs4506913
  misc_feature [331]..[331]: allele = t, in linkage disequilibrium with rs13335346, respectively
  misc_feature [331]..[331]: n is a, t, c or g
agagcaggcatggagggtcttttatttccaaagctttatacacaatgctcaaaataaaaaagacaaagaagacatgacttctataaaagccttataccccagaggcatgtcagacactctgggactgaaacttgaattttggagggaagtggggattaagatgaatgatgaataaatgaatgaacgaatgaatggatgaatgaatcaggctacattttggagccagacatctgtgcctgatctagaaagtaagtcagacagagaagacttctaagaacaagcagaatctcaccaggcagctcaatctggctgcaaacattggattcctcangaatgcgggacttaattatcaaaagaagcgaggtgagcattttccaaatcttcctgcaagtagcatgggcttagttttgacccatggtggccctcacctatcatcactgtaggtactgcctggctggatatcaacccctaagtctggtggaggaagatcatgtgcacccaacactgggttgtctgcaacgaggagagatgctgggttgaggcgtgcattcacaaacatcaattataagactcagacccctccaaacactttccctcttgcaaaaagcttataattagggaactataatcatgaggtcagcacctctcaaaggagcacctt

SEQ ID NO: 5116 - DNA, 661 bp, Homo sapiens
  misc_feature [331]..[331]: Chromosome 16, SNP identification no. = rs8043932
  misc_feature [331]..[331]: allele = a, in linkage disequilibrium with rs13335346, respectively
  misc_feature [331]..[331]: n is a, t, c or g
gttattaggaagttagtacattcctcgtaattttcctggagtggcaactggcacatagcagaaactctacaagtgatgattattatcatttataaaacacgatatcatttctcaaaaaaaggacacacattccaaaagccacattattgcaaaattacatgacacccactattatccagtccttgataaacctctttatttgttctaaggtttcttacactcaagtgaaaaaaggccttagatgcttcacttgggaaagaagctttttattaagataatacggcatttcaaaagaacacaaaatcattttccagtttgatttcgagcctancatcagttaatttctctttgttcttcctttctggctgtgctcatgtccccctttgtgtgtgtacatttatccaatgcaatctaagaaacaatcaccttaattgatctagcgttaacctctaacagcttaagacataggctttttatctatcgctcaatccttgctgcagatgtaattccctatagtgcttacatctttgtcaccctcaccaagggggtccttctccagaaagcatttcagtaaataaatactgctgcaaacaaaacagaccactcaaccaagaggccccactgttgcagaaaagcctggttatggtctcatgctttacct

SEQ ID NO: 5117 - DNA, 661 bp, Homo sapiens
  misc_feature [331]..[331]: Chromosome 16, SNP identification no. = rs8046894
  misc_feature [331]..[331]: allele = g, in linkage disequilibrium with rs13335346, respectively
  misc_feature [331]..[331]: n is a, t, c or g
tcaccttaattgatctagcgttaacctctaacagcttaagacataggctttttatctatcgctcaatccttgctgcagatgtaattccctatagtgcttacatctttgtcaccctcaccaagggggtccttctccagaaagcatttcagtaaataaatactgctgcaaacaaaacagaccactcaaccaagaggccccactgttgcagaaaagcctggttatggtctcatgctttacctggtggtgtgcataatgatgaatttcatacaggtgtcaccattttcaagaccccggcaaggattgatggcttacagtaggctgatccatcatncaaggcagctggcaccctatcggaatttcaggaatctgttcccaatcacattcactgttgggtgactcagtaacgaccctatttgcggtgcgttactgaaaatcaatgtgccacattcaaggtcaatgtactgttggaaaactctttaagctctgatggatggattgtgctcattcagaataaatgtgagaagaaagtgacagctgagcatcccacagccgcgccaactttcaaaggcaggtttcctactttagtgggcagtgggattcgcagagggataacatcacaaacaccttcttgttctctgtttgggggaatgtgtctgcatat

SEQ ID NO: 5118 - DNA, 661 bp, Homo sapiens
  misc_feature [331]..[331]: Chromosome 16, SNP identification no. = rs7195382
  misc_feature [331]..[331]: allele = t, in linkage disequilibrium with rs13335346, respectively
  misc_feature [331]..[331]: n is a, t, c or g
aatctgttcccaatcacattcactgttgggtgactcagtaacgaccctatttgcggtgcgttactgaaaatcaatgtgccacattcaaggtcaatgtactgttggaaaactctttaagctctgatggatggattgtgctcattcagaataaatgtgagaagaaagtgacagctgagcatcccacagccgcgccaactttcaaaggcaggtttcctactttagtgggcagtgggattcgcagagggataacatcacaaacaccttcttgttctctgtttgggggaatgtgtctgcatatgatagtgtatctttccatacacagttaaaacantaacgtgcagaatctctgtggagacatttaccagcccaatgctttaacaatcattgcaaatccgtttggaatctaagtgtttgataggaacaaaatcaaggcaaagcattaagtagactatttaaaatgtgtgtctttggagaaataatttggaaaatagccaaagataagacactcgtttagttcagtttatttcgcaaacacaacatctccaaaatgtaccatgcattgaacccaaggtcaatgatgcaaagataaaagatttggaaactttaactttcactccagaagtttaaaggcaaagacaagagatagatacacaaccaaatt

SEQ ID NO: 5119 - DNA, 661 bp, Homo sapiens
  misc_feature [331]..[331]: Chromosome 16, SNP identification no. = rs10514472
  misc_feature [331]..[331]: allele = g, in linkage disequilibrium with rs13335346, respectively
  misc_feature [331]..[331]: n is a, t, c or g
tcccacagccgcgccaactttcaaaggcaggtttcctactttagtgggcagtgggattcgcagagggataacatcacaaacaccttcttgttctctgtttgggggaatgtgtctgcatatgatagtgtatctttccatacacagttaaaacattaacgtgcagaatctctgtggagacatttaccagcccaatgctttaacaatcattgcaaatccgtttggaatctaagtgtttgataggaacaaaatcaaggcaaagcattaagtagactatttaaaatgtgtgtctttggagaaataatttggaaaatagccaaagataagacactcntttagttcagtttatttcgcaaacacaacatctccaaaatgtaccatgcattgaacccaaggtcaatgatgcaaagataaaagatttggaaactttaactttcactccagaagtttaaaggcaaagacaagagatagatacacaaccaaattattaagtgcagtgagatatatacctgtgcacagacatatagacaaaggttagtgtataatgatataaatataaggtaagagcacgagaaggtgttatccgttctccctggggtcatttacctactggaatggttgtgattaacacctagaaaagtggaaaagaaagcaagttgaggtt

SEQ ID NO: 5120 - DNA, 661 bp, Homo sapiens
  misc_feature [331]..[331]: Chromosome 16, SNP identification no. = rs9930219
  misc_feature [331]..[331]: allele = c, in linkage disequilibrium with rs13335346, respectively
  misc_feature [331]..[331]: n is a, t, c or g
cctcgaatgatacctagcatgtaatcattgctgaataaagagctgtggatgaatgaataagtgagtgaatgagtgcatgaattagatgcgtggataagccataagggaggcaactgtatttttttgttgtgtggaaaatgcctttagcattcatttgcttagaagtctttgtgtgtgtgtgcacgcacgtgtgtgtgtgtgcatgtttcctatatccaatcttcccacctgcatcaataattctgcctggtgacataatttctctgtaaagctttaggtgtctcatcccctgcttgggatgatcatatgagttgatagtttcactgtttcnacaaattggggttccccagcttcctttttatttgacagtctagtaatgcctgtattccaagtcatatttattctagcatccactcatgcattcattattcaagcatttattagcacgtatggtatgtcaggaactatgccaggcacttggaagatgaagtctaagaaatgttccctttcctgaagttgctcagcccataggcgttgggaggtacgtaataaaatatgtaaaagggtaactttaaataattcataattggaaatacaacagataaactgaacaacacatgaggtgaattataggggtggagagagcaatttgagataacgt

SEQ ID NO: 5121 - DNA, 661 bp, Homo sapiens
  misc_feature [331]..[331]: Chromosome 16, SNP identification no. = rs9940998
  misc_feature [331]..[331]: allele = a, in linkage disequilibrium with rs13335346, respectively
  misc_feature [331]..[331]: n is a, t, c or g
actgtttccacaaattggggttccccagcttcctttttatttgacagtctagtaatgcctgtattccaagtcatatttattctagcatccactcatgcattcattattcaagcatttattagcacgtatggtatgtcaggaactatgccaggcacttggaagatgaagtctaagaaatgttccctttcctgaagttgctcagcccataggcgttgggaggtacgtaataaaatatgtaaaagggtaactttaaataattcataattggaaatacaacagataaactgaacaacacatgaggtgaattataggggtggagagagcaatttgngataacgtttaactaaatataacatcacagctgagcctgcgtatccaatgagaagggacatttatggtagagaagagtaatggggtatgtcagacaagaacaccacatttatagaatcaagaagatggaaaacaggaagacgtgcttgagaaatgaggctatttctattgggcaaagattggcaggcaagggaagaaaataaggtgaaaagagtagatcatcactcaaccataaagagtcatatcttcattcccaagactttaggattaaacttgcggacaatagggagccatcgaccattttatctttctacattactgtataacatgc

SEQ ID NO: 5122 - DNA, 661 bp, Homo sapiens
  misc_feature [331]..[331]: Chromosome 16, SNP identification no. = rs8060741
  misc_feature [331]..[331]: allele = c, in linkage disequilibrium with rs13335346, respectively
  misc_feature [331]..[331]: n is a, t, c or g
cattattcaagcatttattagcacgtatggtatgtcaggaactatgccaggcacttggaagatgaagtctaagaaatgttccctttcctgaagttgctcagcccataggcgttgggaggtacgtaataaaatatgtaaaagggtaactttaaataattcataattggaaatacaacagataaactgaacaacacatgaggtgaattataggggtggagagagcaatttgagataacgtttaactaaatataacatcacagctgagcctgcgtatccaatgagaagggacatttatggtagagaagagtaatggggtatgtcagacaagaanaccacatttatagaatcaagaagatggaaaacaggaagacgtgcttgagaaatgaggctatttctattgggcaaagattggcaggcaagggaagaaaataaggtgaaaagagtagatcatcactcaaccataaagagtcatatcttcattcccaagactttaggattaaacttgcggacaatagggagccatcgaccattttatctttctacattactgtataacatgcctacagacaaatgcacagcaaaatgagtacattcatattgcaactcttagatcaaaaacaggacacagccaccacccacagcccccaacacttgcccattt

SEQ ID NO: 5123 - DNA, 661 bp, Homo sapiens
  misc_feature [331]..[331]: Chromosome 16, SNP identification no. = rs13335346
  misc_feature [331]..[331]: allele = a, g
  misc_feature [331]..[331]: n is a, t, c or g
ttcatattgcaactcttagatcaaaaacaggacacagccaccacccacagcccccaacacttgcccatttgcagttactacctcagccagggtccccactatcttatttcgaatagcacagattgactttctcagttttgaacttcatgtaagtgggataatacagtgcacactttgacacattattatgtaggttagattcataatattgttctatatagctgtaggtcatttctttgtattgctgttcagtatttgattgcataaatacaccacaactttaaaatctattctaatttcaatgtgtattttatgtcattcgcattttggnattatgacaaatagtgttgctaggaacatgctattaagtgtcttttggtgaacatatgtacacattttggtagggttgttctaatatatgttgttctatatatagatatatgttgttctaatatatgctgttctaatatatgttgttctatgctgtaatatgtgttgttctaagtatggttgttctaatatatttttcagtcataaaatagacttctgcttgttatacatactcacacatccataattttttatttattcaattaatgatcatcttttcaattagagtctaagttttgtgaatgtggagatcacaggtgcctttttttat

SEQ ID NO: 5124 - DNA, 661 bp, Homo sapiens
  misc_feature [331]..[331]: Chromosome 16, SNP identification no. = rs10459867
  misc_feature [331]..[331]: allele = c, in linkage disequilibrium with rs13335346, respectively
  misc_feature [331]..[331]: n is a, t, c or g
cactttgacacattattatgtaggttagattcataatattgttctatatagctgtaggtcatttctttgtattgctgttcagtatttgattgcataaatacaccacaactttaaaatctattctaatttcaatgtgtattttatgtcattcgcattttgggattatgacaaatagtgttgctaggaacatgctattaagtgtcttttggtgaacatatgtacacattttggtagggttgttctaatatatgttgttctatatatagatatatgttgttctaatatatgctgttctaatatatgttgttctatgctgtaatatgtgttgttntaagtatggttgttctaatatatttttcagtcataaaatagacttctgcttgttatacatactcacacatccataattttttatttattcaattaatgatcatcttttcaattagagtctaagttttgtgaatgtggagatcacaggtgcctttttttatctttgcatctttagtggctagtaccgtgtttgccagatgacaggagatacatgcacacacacacacacacacacacacatcacctgcctaaacaaatgcacaaacgtctatgttcttttccaagtcatatttattccagcatctactcatgcatttattattcaagcatt

SEQ ID NO: 5125 - DNA, 661 bp, Homo sapiens
  misc_feature [331]..[331]: Chromosome 16, SNP identification no. = rs4281728
  misc_feature [331]..[331]: allele = c, in linkage disequilibrium with rs13335346, respectively
  misc_feature [331]..[331]: n is a, t, c or g
atgttcttttccaagtcatatttattccagcatctactcatgcatttattattcaagcatttattagcacatatgatttgtcaggaacaatgccaggcacttggatgataaagaagcctaagatgagacatcttccctgaggttgctttctcatttagaacacagacattttgtttatggtagacaaagattatatttccctcagattcttctttgtagacagaagcagtataatactctatattcttaactattgaatctgttattgaggatgaaaatggagaattacaggtgatataataaattaatttctatgttgtgccaaaatacncagcaagtgttggaattcgatcaaaaaagtcgttaacggaatgaggaagacaatttttaaaattctgataacttccaataacactagtgtagctaaagagtttagtgggatgaagggtggtttggaagaaaatagcccattcaggagactgttgtaaatgtccccttcgtgtggagatgtttctgcattgccttaaatacagcctatgtctgcttttgagaattaatagcaggaaaaattgtcgaaggaaaaatgtaaaagtaatgcatctatatgctttcacaggaccttatcccaactccaaattcacaatcgtcaattaaagagctg

SEQ ID NO: 5126 - DNA, 661 bp, Homo sapiens
  misc_feature [331]..[331]: Chromosome 16, SNP identification no. = rs9319545
  misc_feature [331]..[331]: allele = t, in linkage disequilibrium with rs13335346, respectively
  misc_feature [331]..[331]: n is a, t, c or g
gagtggatctgcagttccacctcactgtatctcatgagttcaaagttaagtggtggctaggattggggtcatctggaaggctttctggctttcatatctggggcctgggcttcaaagacttgagcagagggatgctggagcaagtgggcaccccaggaatctctagacttacctagattcaagaggaagaaacctagacctcatttctagatgcaggtgttagcattacattgtaagaaaagcatatgggattagcatgatcatttttggcaaatactatctgccaccaactgattgctgcaatgttgggagcataattcctgttttcctnggccatttccaggccagtggggaacagctgaattaggacctgaaagaaggtgtctattcactgatgggctagctgtctggggcagccactgtcgcttcactctgagtctatattgctactttatgcagaaccaaaaatctgtcctcctctggcttttatctacacgaattaggttctagccaccttgttatggactgaatgcttaagttccccacaaattcatatgtggaaactctaacccacagtgtgatggtatttggagttgaggactttgggaggtaaataggtttagattaggttatatcctctcctaaagagattagtggtgcc

SEQ ID NO: 5127 - DNA, 661 bp, Homo sapiens
  misc_feature [331]..[331]: Chromosome 16, SNP identification no. = rs4888055
  misc_feature [331]..[331]: allele = a, in linkage disequilibrium with rs13335346, respectively
  misc_feature [331]..[331]: n is a, t, c or g
aaccactcagtctctgttattttgttataaccacttgagctgactgagacacacttgtactgggccttatctctgtaagcctatatacctggtggcccatatacatgtcgaatatatgaaccaatggttcaaccaattaattaatactatctatattaatttcctttgactgtcataacaaagaaccatagactgggcagcttaaacaacagaaatttactttctcacagctttggcggctggaagtttaagatcaaggtgcctgcagagctggtttccccgaggcctctcttctgggcttgcagatggccacccccttgctgcctcttcntatggtcatcctctgttctgtgtgctcctggcatctctccctattcttacaaggacaccagccacattagattagagcccaccctgagggcctcattttaacctgatcagttctctaagggtattatttctgaatatagttacattaggatgtattatgggttgaaactgtaacatacaaaattttgcttttggagaagggtccaattctgcccatagcatagtctaagaaacccgaaagtaagactgctcttttattcacatgactatcttgaaaacacatgcaaacagtgatcttattgctccccctcaactccctcttctctaagct

SEQ ID NO: 5128 - DNA, 661 bp, Homo sapiens
  misc_feature [331]..[331]: Chromosome 16, SNP identification no. = rs6564719
  misc_feature [331]..[331]: allele = a, in linkage disequilibrium with rs13335346, respectively
  misc_feature [331]..[331]: n is a, t, c or g
aacacttttatgtgcacatttgttaaatacatttggatcataaaaataatgcatgtctatggttcacaatttagaaggtataaataaccttaaatctgagaataaaaaatcacctagtatcccactaacctaaaataatagctcagatgttcctttttaacatctagatacatatgaacacgtgagtgtgagtatacacactttttatacatataacattcctatattacaatattataaaatgttcttcaaaaacttgatttttaatggctgctgaataatttcattgtgtatacgtagcccaatttatgcaataattagccttcctttngaaaagaacgtaagatcataatgtaattctcatgattccattaattacactttcttgctaaaatactcatttcatttcttggtaaaaagaaaaaaaaaactaatttctttagcttacaatatcatctgttggcctaatgaggctatgtagattctactcctaaaccatagaatactgtagctgaaggcctcgtggaaatgaccagctccaacttctttaacgcataatgcagagaactaagtcccagagaggggagggggctttctaaagccaaaaacaaaatctgaaactacaattcgtgccttctggggtacagagtgaagcttcaat

SEQ ID NO: 5129 - DNA, 661 bp, Homo sapiens
  misc_feature [331]..[331]: Chromosome 16, SNP identification no. = rs4445915
  misc_feature [331]..[331]: allele = a, in linkage disequilibrium with rs13335346, respectively
  misc_feature [331]..[331]: n is a, t, c or g
tcatccagaggtcacccacagttttctgaacatgtggatacagcttcctgcgtctctctagtgagggaaattctccattctcagtgcccagccctcttgctagacaggctgaagtgtccaagaattaacattccagaagtgaccctcaaccaaggatgaatgaaagttagtggattaatatccaaggtttcttgtgttccccctcaggcagtgagacagttctgaggcatagtctacagtgcctcgcaggtcccagggggatggagcctcagtgattcccagaggaaccactcttgtttttctcacagcacttcctgggatcactgccttngataatgacagaaacaaggaaaacacaattccagactgttctgtactttgaatattatggcagctttgcactagaatattaattgggcaaagaaaagaaaatatatacttaagctaagaaatccatttgacctgtgagtcacctgaaataaatgcttgtctcaggttctgcttttgagagaaaaccaaaccaagacaagatatctatgtttactatgtgtattccataaaggaaaagttataagatgtcatctgtatacacagtagggaaactcttccacttatctattgttccacaacaaacaaactgtattctcttaaaacaatcagt

SEQ ID NO: 5130 - DNA, 661 bp, Homo sapiens
  misc_feature [331]..[331]: Chromosome 16, SNP identification no. = rs4627367
  misc_feature [331]..[331]: allele = g, in linkage disequilibrium with rs13335346, respectively
  misc_feature [331]..[331]: n is a, t, c or g
tggatacagcttcctgcgtctctctagtgagggaaattctccattctcagtgcccagccctcttgctagacaggctgaagtgtccaagaattaacattccagaagtgaccctcaaccaaggatgaatgaaagttagtggattaatatccaaggtttcttgtgttccccctcaggcagtgagacagttctgaggcatagtctacagtgcctcgcaggtcccagggggatggagcctcagtgattcccagaggaaccactcttgtttttctcacagcacttcctgggatcactgccttagataatgacagaaacaaggaaaacacaattccanactgttctgtactttgaatattatggcagctttgcactagaatattaattgggcaaagaaaagaaaatatatacttaagctaagaaatccatttgacctgtgagtcacctgaaataaatgcttgtctcaggttctgcttttgagagaaaaccaaaccaagacaagatatctatgtttactatgtgtattccataaaggaaaagttataagatgtcatctgtatacacagtagggaaactcttccacttatctattgttccacaacaaacaaactgtattctcttaaaacaatcagttattacttcttatgggtctggggtagatgggctc

SEQ ID NO: 5131 - DNA, 661 bp, Homo sapiens
  misc_feature [331]..[331]: Chromosome 16, SNP identification no. = rs4444353
  misc_feature [331]..[331]: allele = t, in linkage disequilibrium with rs13335346, respectively
  misc_feature [331]..[331]: n is a, t, c or g
gggggatggagcctcagtgattcccagaggaaccactcttgtttttctcacagcacttcctgggatcactgccttagataatgacagaaacaaggaaaacacaattccagactgttctgtactttgaatattatggcagctttgcactagaatattaattgggcaaagaaaagaaaatatatacttaagctaagaaatccatttgacctgtgagtcacctgaaataaatgcttgtctcaggttctgcttttgagagaaaaccaaaccaagacaagatatctatgtttactatgtgtattccataaaggaaaagttataagatgtcatctgnatacacagtagggaaactcttccacttatctattgttccacaacaaacaaactgtattctcttaaaacaatcagttattacttcttatgggtctggggtagatgggctcagctgggcagttcccctttatggtccctcctataaatgctgtcagatggtagctaagattagagtcacctgaaggctttttcattcatatctctgatgggtgaactggatgggcatccctctttacatggagtcctccatgtggctagctcgggcttccctacatcatggtagttgaaagttaaactttttctactttggatgtcttccttaagttcccat

SEQ ID NO: 5132 - DNA, 661 bp, Homo sapiens
  misc_feature [331]..[331]: Chromosome 16, SNP identification no. = rs4888057
  misc_feature [331]..[331]: allele = a, in linkage disequilibrium with rs13335346, respectively
  misc_feature [331]..[331]: n is a, t, c or g
actttggatgtcttccttaagttcccattccaagagacagcaaatgcaacctgtcagtattaaagcctgagtttggaaactggtacggtctcccttctgcaatatcctcttggacaagcagtcacagaacctacccaggctcaaggaaaaggacatgaatgcccccttcccctttgatgggaggagtgtccaatacttttattcatcttatatctaccaaagaaacttaactatttacagtgatttgggggggagaataaggcagcacctgttcgaataaggtatatttaagatgacacctgaagataggagagtgccaggctgagaggcntaagggaggagggaaaagggaacgcattccaggcaggaggaaaagtatgtgcacagacacttggcgttttgaagacctgaaaaaaatgtcagtgtggatgatggcaataagcctggaggacagattaggagggaacacctgcagagatagcaaaggcctggtcagggtggcccacgaaggtggtgctaagtatgctactgtgtcctttaatagaaatcagcatcaaggattatcatgatgtaatttatatattttaaaaatctctctagctcagaaacactcgaagtgtgagtgtcagaccagacccagattgcgaagtttgttaccagg

SEQ ID NO: 5133 - DNA, 661 bp, Homo sapiens
  misc_feature [331]..[331]: Chromosome 16, SNP identification no. = rs4888058
  misc_feature [331]..[331]: allele = a, in linkage disequilibrium with rs13335346, respectively
  misc_feature [331]..[331]: n is a, t, c or g
gataggagagtgccaggctgagaggcataagggaggagggaaaagggaacgcattccaggcaggaggaaaagtatgtgcacagacacttggcgttttgaagacctgaaaaaaatgtcagtgtggatgatggcaataagcctggaggacagattaggagggaacacctgcagagatagcaaaggcctggtcagggtggcccacgaaggtggtgctaagtatgctactgtgtcctttaatagaaatcagcatcaaggattatcatgatgtaatttatatattttaaaaatctctctagctcagaaacactcgaagtgtgagtgtcagaccagncccagattgcgaagtttgttaccaggcaaacgttgttacccattagatggtatagaatttgagcataagcattcagaaactttcttagcatttgaaactgctgtaatatccaagcatatatgcataaatatatatatgcatatatccaaatatatatttatgcatatatccaaacatatatgtctgtgtgtgtattggatactatacacacacacacacacacacacacacacatatatacatgcatatatatatatatatctccaagatataaatatattgcattttacaagaatattgatccacaatgcattgggggaaaaaacactt

SEQ ID NO: 5134 - DNA, 661 bp, Homo sapiens
  misc_feature [331]..[331]: Chromosome 16, SNP identification no. = rs16951730
  misc_feature [331]..[331]: allele = a, in linkage disequilibrium with rs13335346, respectively
  misc_feature [331]..[331]: n is a, t, c or g
tgttacccattagatggtatagaatttgagcataagcattcagaaactttcttagcatttgaaactgctgtaatatccaagcatatatgcataaatatatatatgcatatatccaaatatatatttatgcatatatccaaacatatatgtctgtgtgtgtattggatactatacacacacacacacacacacacacacacatatatacatgcatatatatatatatatctccaagatataaatatattgcattttacaagaatattgatccacaatgcattgggggaaaaaacacttagccttttaccatagtttataaaacactgctctngctaagggacctagtgggatgaagtgtagtttggaagaaaggaacccatttgggagagtattaagggagtgatgttgacacaggttagattaaaagtcatggagatggaaagaatggacagttttaaataaagtttagaagggcagataggcaggacctggtgatgggctgggaggtagggaaaaagagaagtgggccttagggctgtctcccaggtctccagagagaaaaactgcattaacagagacatcacataatgagatgtgagttactggaaaaaggaaagtgaattcaactcagaattgctttgcatttgccatcacaactttt

SEQ ID NO: 5135 - DNA, 661 bp, Homo sapiens
  misc_feature [331]..[331]: Chromosome 16, SNP identification no. = rs4243187
  misc_feature [331]..[331]: allele = c, in linkage disequilibrium with rs13335346, respectively
  misc_feature [331]..[331]: n is a, t, c or g
atatatatatatatatctccaagatataaatatattgcattttacaagaatattgatccacaatgcattgggggaaaaaacacttagccttttaccatagtttataaaacactgctctagctaagggacctagtgggatgaagtgtagtttggaagaaaggaacccatttgggagagtattaagggagtgatgttgacacaggttagattaaaagtcatggagatggaaagaatggacagttttaaataaagtttagaagggcagataggcaggacctggtgatgggctgggaggtagggaaaaagagaagtgggccttagggctgtctcncaggtctccagagagaaaaactgcattaacagagacatcacataatgagatgtgagttactggaaaaaggaaagtgaattcaactcagaattgctttgcatttgccatcacaacttttgtcttgaaacttctaatgatcattgaaaaggaaatacatccttaaggctgagacacattatcgttttattttaattagaggccacctacaatacagaaacaagtcaacataattcacttttctaatcaaagagaattctttgagagcagaagagatatagcatccaaataaatgaggggtaattttcttaatgaactaagtcatcatgaatc

SEQ ID NO: 5136 - DNA, 661 bp, Homo sapiens
  misc_feature [331]..[331]: Chromosome 16, SNP identification no. = rs4555167
  misc_feature [331]..[331]: allele = a, in linkage disequilibrium with rs13335346, respectively
  misc_feature [331]..[331]: n is a, t, c or g
aacttttgtcttgaaacttctaatgatcattgaaaaggaaatacatccttaaggctgagacacattatcgttttattttaattagaggccacctacaatacagaaacaagtcaacataattcacttttctaatcaaagagaattctttgagagcagaagagatatagcatccaaataaatgaggggtaattttcttaatgaactaagtcatcatgaatcactgtgtggaatcccgccttgtgctgtagagcctgtgacatttccaacaatgcaacactatttggtaaatattaaaggctgctagagaaaggggataagaaatgacctttcnatctatatggagcaagttaattactaaaaaggcagcaattggttgtaaaggactgttctgctgtcgtcaccactgaagcatgcctgtgccttttggttatgaattatccttggaagaaatatggacacatgacattaacatttacaatgtcattcagtataaatatccattcttaaaaatgtctttgggccctgcacagtcttaaatatgggtaggtttttaagcttaaatatatttttgagcgttctcctggaaactactaacaaggcaatatagcgccatgggaagagtaccaaaggagagtcataagtcccttgtttagaataatga

SEQ ID NO: 5137 - DNA, 661 bp, Homo sapiens
  misc_feature [331]..[331]: Chromosome 16, SNP identification no. = rs4258627
  misc_feature [331]..[331]: allele = a, in linkage disequilibrium with rs13335346, respectively
  misc_feature [331]..[331]: n is a, t, c or g
acttctaatgatcattgaaaaggaaatacatccttaaggctgagacacattatcgttttattttaattagaggccacctacaatacagaaacaagtcaacataattcacttttctaatcaaagagaattctttgagagcagaagagatatagcatccaaataaatgaggggtaattttcttaatgaactaagtcatcatgaatcactgtgtggaatcccgccttgtgctgtagagcctgtgacatttccaacaatgcaacactatttggtaaatattaaaggctgctagagaaaggggataagaaatgacctttcaatctatatggagcangttaattactaaaaaggcagcaattggttgtaaaggactgttctgctgtcgtcaccactgaagcatgcctgtgccttttggttatgaattatccttggaagaaatatggacacatgacattaacatttacaatgtcattcagtataaatatccattcttaaaaatgtctttgggccctgcacagtcttaaatatgggtaggtttttaagcttaaatatatttttgagcgttctcctggaaactactaacaaggcaatatagcgccatgggaagagtaccaaaggagagtcataagtcccttgtttagaataatgaatcagtcgcttaata

SEQ ID NO: 5138 - DNA, 661 bp, Homo sapiens
  misc_feature [331]..[331]: Chromosome 16, SNP identification no. = rs4271604
  misc_feature [331]..[331]: allele = g, in linkage disequilibrium with rs13335346, respectively
  misc_feature [331]..[331]: n is a, t, c or g
tacaatgtcattcagtataaatatccattcttaaaaatgtctttgggccctgcacagtcttaaatatgggtaggtttttaagcttaaatatatttttgagcgttctcctggaaactactaacaaggcaatatagcgccatgggaagagtaccaaaggagagtcataagtcccttgtttagaataatgaatcagtcgcttaataccaatgtgagccaattggattttatttaacccatattgtcccaaacttatttgattacagaaacttttttatttcataacagcacttgatataccatctctttgtagaatttgcattggtgtaatggntcacagcatgggaatttggaacactgcacctggttagattttcagctctactattttctaaatgtggacatggagactctatgaccaatgcttgttttctttgttaagtgcgaataaaatactttgtctgcttgaattgttgctaaaatagataaataaaataaataagtaaataaaacatgtaaagtgattgtctcacaactagccaaatcatacagttcaatacatagcagccatgttttatttttttgtatcaccagtgcctgagacaggataaatgctcatggtctgttgaaggccttctgggaagatggtgagggagtcaagaat

SEQ ID NO: 5139 - DNA, 661 bp, Homo sapiens
  misc_feature [331]..[331]: Chromosome 16, SNP identification no. = rs4462604
  misc_feature [331]..[331]: allele = c, in linkage disequilibrium with rs13335346, respectively
  misc_feature [331]..[331]: n is a, t, c or g
aataccaatgtgagccaattggattttatttaacccatattgtcccaaacttatttgattacagaaacttttttatttcataacagcacttgatataccatctctttgtagaatttgcattggtgtaatgggtcacagcatgggaatttggaacactgcacctggttagattttcagctctactattttctaaatgtggacatggagactctatgaccaatgcttgttttctttgttaagtgcgaataaaatactttgtctgcttgaattgttgctaaaatagataaataaaataaataagtaaataaaacatgtaaagtgattgtctcanaactagccaaatcatacagttcaatacatagcagccatgttttatttttttgtatcaccagtgcctgagacaggataaatgctcatggtctgttgaaggccttctgggaagatggtgagggagtcaagaatgcaggataaagagttaatcagcattgctgaaacaagaatccaagtttcctgtggcacagttctaagtctctttcactatagagtacggcttctccaagctggaagagactcccatgtgtagctgggaaaggagaaatggagaagtggggagagaattaagtaaaaagaatattagtataaaagaaaagatgagaaatta

SEQ ID NO: 5140 - DNA, 661 bp, Homo sapiens
  misc_feature [331]..[331]: Chromosome 16, SNP identification no. = rs4243188
  misc_feature [331]..[331]: allele = t, in linkage disequilibrium with rs13335346, respectively
  misc_feature [331]..[331]: n is a, t, c or g
aacttatttgattacagaaacttttttatttcataacagcacttgatataccatctctttgtagaatttgcattggtgtaatgggtcacagcatgggaatttggaacactgcacctggttagattttcagctctactattttctaaatgtggacatggagactctatgaccaatgcttgttttctttgttaagtgcgaataaaatactttgtctgcttgaattgttgctaaaatagataaataaaataaataagtaaataaaacatgtaaagtgattgtctcacaactagccaaatcatacagttcaatacatagcagccatgttttattnttttgtatcaccagtgcctgagacaggataaatgctcatggtctgttgaaggccttctgggaagatggtgagggagtcaagaatgcaggataaagagttaatcagcattgctgaaacaagaatccaagtttcctgtggcacagttctaagtctctttcactatagagtacggcttctccaagctggaagagactcccatgtgtagctgggaaaggagaaatggagaagtggggagagaattaagtaaaaagaatattagtataaaagaaaagatgagaaattaagtaagacaggggaaggagaaaagagatagaagatggatagaataga

SEQ ID NO: 5141 - DNA, 661 bp, Homo sapiens
  misc_feature [331]..[331]: Chromosome 16, SNP identification no. = rs11866704
  misc_feature [331]..[331]: allele = g, in linkage disequilibrium with rs13335346, respectively
  misc_feature [331]..[331]: n is a, t, c or g
tcaagaatgcaggataaagagttaatcagcattgctgaaacaagaatccaagtttcctgtggcacagttctaagtctctttcactatagagtacggcttctccaagctggaagagactcccatgtgtagctgggaaaggagaaatggagaagtggggagagaattaagtaaaaagaatattagtataaaagaaaagatgagaaattaagtaagacaggggaaggagaaaagagatagaagatggatagaatagaagatagataaatagaaaaaggaaggaaagaagaaagggagaagaaagaagagacaaagaagaaaggaaggaggatanggaaagggtctgttatggataaaattaagtcaccaaataaaatctcaagtcatagaaaactgcagttagactcataacaactaaagcattattcagcaggtgctaagtttttcacaatagaatcaaatttgttcaatcctgacctggcttttatgcactgggtgaccccagatgaatttgcctagcctccataatgctccattttcttctttaaaatatttatccttttagggctagtacaagaaaataagacaatacatgtaaaaaaaaaacttagctctgtggcaggaccatgttaacagtcaatcaagtcgtggttatcacagtcag

SEQ ID NO: 5142 - DNA, 661 bp, Homo sapiens
  misc_feature [331]..[331]: Chromosome 16, SNP identification no. = rs4889049
  misc_feature [331]..[331]: allele = c, in linkage disequilibrium with rs13335346, respectively
  misc_feature [331]..[331]: n is a, t, c or g
ggcttctccaagctggaagagactcccatgtgtagctgggaaaggagaaatggagaagtggggagagaattaagtaaaaagaatattagtataaaagaaaagatgagaaattaagtaagacaggggaaggagaaaagagatagaagatggatagaatagaagatagataaatagaaaaaggaaggaaagaagaaagggagaagaaagaagagacaaagaagaaaggaaggaggatagggaaagggtctgttatggataaaattaagtcaccaaataaaatctcaagtcatagaaaactgcagttagactcataacaactaaagcattattnagcaggtgctaagtttttcacaatagaatcaaatttgttcaatcctgacctggcttttatgcactgggtgaccccagatgaatttgcctagcctccataatgctccattttcttctttaaaatatttatccttttagggctagtacaagaaaataagacaatacatgtaaaaaaaaaacttagctctgtggcaggaccatgttaacagtcaatcaagtcgtggttatcacagtcagggtgtaacctgtggtgctttcagaatcgaaaacctcagggccagatcagtaccaagaaagaagattgacaaaaaaggaggaaatatacggatga

SEQ ID NO: 5143 - DNA, 661 bp, Homo sapiens
  misc_feature [331]..[331]: Chromosome 16, SNP identification no. = rs12445070
  misc_feature [331]..[331]: allele = c, in linkage disequilibrium with rs13335346, respectively
  misc_feature [331]..[331]: n is a, t, c or g
agctacaggtggccaaaaaacatatgaaaaaatgctcaacatcactaaccactaaagaaatgcaaatcaaacccacaatgagatatcatttcacaccagttagaacggcttttgttaaaaagtcaaaaaaaaacagacactggagaggcagtgagaaaagggaacaggtatacatacacttttgatgggaatataaattagttcagccactgtggaaagcaatttggagatttctcaaataacttaaaacagaactaccattcaggccagcaacccgattatatccaaaagaaaataggtcattctaccagaaagacacatccactcggangttcatctctgcactattcacaataacaaagacatggaatcaatctaggtgcccatgagtggtggactggataaagaaaatgtggtacatatacaccatggaatactacacaaccataaaaaagaatgaaataatgtccttcgcagcaaactggacgcagctggagactactatgctaagcaaattaacacaggaacagaataccaaatgccacatgttctcacttataagtgggagctaaacattgggtactcatggatgtaaagatggaaacagtagacactagggactaccagaaggagcaggaggggaggaagacatgggttgaaa

SEQ ID NO: 5144 - DNA, 661 bp, Homo sapiens
  misc_feature [331]..[331]: Chromosome 16, SNP identification no. = rs8062687
  misc_feature [331]..[331]: allele = g, in linkage disequilibrium with rs13335346, respectively
  misc_feature [331]..[331]: n is a, t, c or g
ttaatactttcttaatgtcaagcaccacttcctaattccctcatgactggtcataagttgtcctctgcagaatttccccttcactgcctctccagtgtttatctaataccctcagaatgtgcactctagcagcacttccctggtcaaatcttaatctgacctttccttcttctcttccaagttttgaccttttgtggcagaactcgagctagcctctgataagcaaaaagctctactcttctccattgttttgtgagccactaagctgaacctgataaaagacaaaagagagatccagctcttttaaatgagccatacctgtcccttcctnttactgctgtaccagatacctggtctgggacctctcaacagcttccatcaagaagaacctcatatttctcaccaaacccatagcttaaggagtcacattatagcacttcagtatatctgggaagattagagcccataaaaaaatgctttggcaccagcaatttaatgcttaaagctctaatctggaattggtatatttatcctggtctttaattattaatgttgctttattgatctgattcctaaaatgcaaacaacaaaaactgttcaaactaattattgtgggctttctaccttttggggcttctctactagtcttcgaatctaaacc

SEQ ID NO: 5145 - DNA, 661 bp, Homo sapiens
  misc_feature [331]..[331]: Chromosome 16, SNP identification no. = rs4243190
  misc_feature [331]..[331]: allele = g, in linkage disequilibrium with rs13335346, respectively
  misc_feature [331]..[331]: n is a, t, c or g
acacaaagacattttatccctaaggaatcttatacactggaatgagatggtaccagcatgcagacataaagtcaccttgacacctgcttatgcatttttgttgggccaatcagcaatgtcagttaggtagaaatgcattctgaataatatttatagatggagagtctgatgagctaaagtagggtgctacttgtgacaattgtttatttctgggccactaaacccgatttttgattcatgagcatggcttctgtccacatcccaggcagctcactgccttctatcttgtgctattggctataaaggtaggaggaggtagaagcatgccatngtctgctccaccattagaggaaacttctttgaagtgattcttagaaagagaaatgttaattaggcatttacttacttaaaccactgcttggcacatagtaggcactccgtaaatgtctgtaatgaataagtgaatgccaatggtcaggttctttgccattaagaaatttacagtctcgtggggattcaagtgaagatgccacattcatgctctttatcgcttatgggaaccccaaggacggtatatggcattctctggcttccatacattcctctagaccctcttgaatataattatagattctgtttgtatcacctcttgggataacga

SEQ ID NO: 5146 - DNA, 661 bp, Homo sapiens
  misc_feature [331]..[331]: Chromosome 16, SNP identification no. = rs4461087
  misc_feature [331]..[331]: allele = t, in linkage disequilibrium with rs13335346, respectively
  misc_feature [331]..[331]: n is a, t, c or g
gtggctagagaaatgagctccaggatctgaagaactgagtttcatctcagagatgttttctccaagctgtgtgacacaaaatagccattgttatctgcaatgtccccagcaaagggcttgttcctgttcctcaacctggatactgcaggaccatcttctgtttgcatctctcagaatctcatgtctcactttgctctgattaacacaaatcctttgagatgtgtgatgttttccaaggcactcttatttgagaaagaaagcaatgttgggtaaaaccaagtggataaccaaaaaacaacacaaaggaacagtaaatgattaagattgaagntcgtcaagaggttacaatgggtttatgccaccggtagcaacaggaagaacaatgcatttaaatccacatctttcattctcttctgccaactgcaaatcactaacccactcaagtggcaccttctctgggaagcacttttttgtcccacccacttcccagactaagttcccatgagcttccttggggttttgtaaatacctctactcgtatgtgataccatgctcctcttcctctttttaatgtttgcttatttgtctgtttttctactggccttgaatcacttgaggggaaaagctgtcattacagattctcaattctgatttgttgttt

SEQ ID NO: 5147 - DNA, 661 bp, Homo sapiens
  misc_feature [331]..[331]: Chromosome 16, SNP identification no. = rs8045969
  misc_feature [331]..[331]: allele = a, in linkage disequilibrium with rs13335346, respectively
  misc_feature [331]..[331]: n is a, t, c or g
tcaagtcgtagatctagacaatgtctggataagtctcatggagccagagaatgtctcaggcaagggctgcagtgattttgttgcagagagaaaataaatgttctgccaacattgtattgagaaagggagggagagagatccatatgaaagaagagcacttagaagcatctgtcagtaggctaggccaatgttgtagggcttagaggagttgatgagttgcatgtagcatgggtaaatactcaatgagtagaaagctcactttggtttatccccatctagcaccatctaatgtaagcagatgacacatatgtgaagtcaggggagagaattntcttacatggatacaagtcactctgtaatattctttacctagattgtcaaaatgtatttttagaacagatttatcatgcaatgtcaataggcccatggggctggtactagggtaaggtgagtgggacaccagcttccagtataaaaattaacggggagccctggatgtgcaaaacttggactcttgattcaccccaatcctggtcccttaggtccctttaaaaaaaatttgatgttttgatcatggtggatctttttgcattgtttgaattttattaaatactgcattaaaatattatttattttgatcactaatatttttggcaccctc

SEQ ID NO: 5148 - DNA, 661 bp, Homo sapiens
  misc_feature [331]..[331]: Chromosome 16, SNP identification no. = rs4243191
  misc_feature [331]..[331]: allele = t, in linkage disequilibrium with rs13335346, respectively
  misc_feature [331]..[331]: n is a, t, c or g
actctgtaatattctttacctagattgtcaaaatgtatttttagaacagatttatcatgcaatgtcaataggcccatggggctggtactagggtaaggtgagtgggacaccagcttccagtataaaaattaacggggagccctggatgtgcaaaacttggactcttgattcaccccaatcctggtcccttaggtccctttaaaaaaaatttgatgttttgatcatggtggatctttttgcattgtttgaattttattaaatactgcattaaaatattatttattttgatcactaatatttttggcaccctcttagatcttgcacctgcagngaataatgctctcacctcaccttactcctggccctgaggctcatttgcaaatgaggaaagtgaggctcagataacatttgtactttggccaaggccacatatctagttagcataagagctgatttgaaactcagcacaccctgactcccgagccccactgtttccaccctacctgctgtctctatttgaaaaacttatctattaccacctgtgcaggtaacagcacaaggcaccatgatgccatccccaaaaaaaagatgtccctaaaggacaatggaagtgggggaaagtggaagagagatacattgctaaactcttttcaatgggaaa

SEQ ID NO: 5149 - DNA, 661 bp, Homo sapiens
  misc_feature [331]..[331]: Chromosome 16, SNP identification no. = rs4243192
  misc_feature [331]..[331]: allele = t, in linkage disequilibrium with rs13335346, respectively
  misc_feature [331]..[331]: n is a, t, c or g
atgatgccatccccaaaaaaaagatgtccctaaaggacaatggaagtgggggaaagtggaagagagatacattgctaaactcttttcaatgggaaagtttagttctaaaataatcaagagccattattaaaataggaattgcaagaagatgctatgcactggccaggcagctgtggaacctactgagttgagtgagaatttctgaataccgagtgatcattagcatcttcagagaaatcactttttagaacggactcagagaaataggaaagaaaaacactttaggatgatgccgtggaaagaatgggaattcccagagacaacatgtaanaaatgatgtgtaagggtgattaatgagaattaggcacgggattaacattgaaagaccaatgagctcccgcagataacattatttgttttttacctggagcatgaccattctactgccttagtgggaaacagtttgtggaggagctggactttaccacctgcaaaatgtaatgctcaaatcaatttttggttgtcgtatgtctatttttgctaattaagttattttaaaagatagtttctgtctcctccatgagccataagctcattgaggacacacattatgccagttttgcctactgttttaactcttaggcatagtcaatgcttaata

SEQ ID NO: 5150 - DNA, 661 bp, Homo sapiens
  misc_feature [331]..[331]: Chromosome 16, SNP identification no. = rs4603572
  misc_feature [331]..[331]: allele = c, in linkage disequilibrium with rs13335346, respectively
  misc_feature [331]..[331]: n is a, t, c or g
attatttgttttttacctggagcatgaccattctactgccttagtgggaaacagtttgtggaggagctggactttaccacctgcaaaatgtaatgctcaaatcaatttttggttgtcgtatgtctatttttgctaattaagttattttaaaagatagtttctgtctcctccatgagccataagctcattgaggacacacattatgccagttttgcctactgttttaactcttaggcatagtcaatgcttaataaatatttttgaataaataacggattttgaatgaatttcaaaatgtatatctcagagataggcaatcctatatctctgncagtggctaagtggtgttgtagacttagccctctcagtagatggatatatgctcccttaggaccacagcatgctggctttgatctgctcattgaagaagccacagttacccatgctttgggtcattggtatctgctcaactatctgcttaaaatgattatgagcatagttttcccatgtccgacattttttgtttctctcaactcagctttcatgttacctcctgggagaaactttctccgaccagctaattttttctttttaattggtgtttttagttttcgttcagcctcttttccacactatccatcattctgactcattttttttt

SEQ ID NO: 5151 - DNA, 661 bp, Homo sapiens
  misc_feature [331]..[331]: Chromosome 16, SNP identification no. = rs11150235
  misc_feature [331]..[331]: allele = g, in linkage disequilibrium with rs13335346, respectively
  misc_feature [331]..[331]: n is a, t, c or g
gatcaagccatatgtaaacctcggggaagatgttcctggctaggagaacagtggtaacagctagcatttcctgaaagtttatcatgtgacagaaaccctgctaggtgttttacatactttatcttgtttaatcctctaacaggtaatattagtttcctttgagaaaactgagacctagaaagattaagggattttgttttcccaaggtcaatcagccagtaagtgtagacaccaggattcaaatccagtgtgaaacttcaaagcctgcctctgaggaaaaagacagaaggggaaactgggctatacttgattaatagaaacgtgttccacnactggcccctcaaaattggtcatgactgggcatggctggacactccacctagtagtacagcagcagaagcattaaccccagcagcctgattccaaagcctgggtggctaaccactggcttccaaagagccgcagactgggtggtgctggctggttggtccggttaagattttaatgccctaagcaggcaggccagttcaaagcactcatagagtgctaccttagccaggtttccctgtgtcctattttgcaaaccaatcaaccagtcaaccaacaaacaacaacaacaaaaagggggaccccagggttcagtgagaagaaacaccaggaa

SEQ ID NO: 5152 - DNA, 661 bp, Homo sapiens
  misc_feature [331]..[331]: Chromosome 16, SNP identification no. = rs8051754
  misc_feature [331]..[331]: allele = g, in linkage disequilibrium with rs13335346, respectively
  misc_feature [331]..[331]: n is a, t, c or g
cctgaaagtttatcatgtgacagaaaccctgctaggtgttttacatactttatcttgtttaatcctctaacaggtaatattagtttcctttgagaaaactgagacctagaaagattaagggattttgttttcccaaggtcaatcagccagtaagtgtagacaccaggattcaaatccagtgtgaaacttcaaagcctgcctctgaggaaaaagacagaaggggaaactgggctatacttgattaatagaaacgtgttccacgactggcccctcaaaattggtcatgactgggcatggctggacactccacctagtagtacagcagcagaancattaaccccagcagcctgattccaaagcctgggtggctaaccactggcttccaaagagccgcagactgggtggtgctggctggttggtccggttaagattttaatgccctaagcaggcaggccagttcaaagcactcatagagtgctaccttagccaggtttccctgtgtcctattttgcaaaccaatcaaccagtcaaccaacaaacaacaacaacaaaaagggggaccccagggttcagtgagaagaaacaccaggaacatcctggactagcatcagacagacagtgtggctgccattgttcttagggagacccacaattggcttca

SEQ ID NO: 5153 - DNA, 661 bp, Homo sapiens
  misc_feature [331]..[331]: Chromosome 16, SNP identification no. = rs7188559
  misc_feature [331]..[331]: allele = g, in linkage disequilibrium with rs13335346, respectively
  misc_feature [331]..[331]: n is a, t, c or g
gttctttctttctttccttccttccttcgttctctccttcactcatttttttgggacagggtcttgctctgtctcccaggctacagtgaagtggcatgatcttggctcactgcagtcaccacctccagggatgaagggatccttccatctcagcatcccaattagctgggactacaagcgtttgccaacacacctggctaatttttgtattctttgtagagacggtgtctccctatgttgcccaggttggtcttcaactcctgggctcaagtgatcctccctcctcggcctcccaatgttctgggattacaggcatgagccactgcaccgngccatgttattttcattttatcaaagaggaaactaaggcaaagacaaggcagcaacaagtccaggctctgctgctctaagttgattccacagatgtcctcgtgaaagcatttatcaacttgtgtgcaaggcacactcagggacactcatttcaactaatatggagagagcatgccctgtctttcagccagtgaattaagtcttgaagttatcaagatttaggttaaacacagagaccctgttctcaaggagttcgtgatttaaaggagcattctcagtcctggctgaattgtactttcacctgcgacactgcccttccctctcagaaaat

SEQ ID NO: 5154 - DNA, 661 bp, Homo sapiens
  misc_feature [331]..[331]: Chromosome 16, SNP identification no. = rs7192512
  misc_feature [331]..[331]: allele = c, in linkage disequilibrium with rs13335346, respectively
  misc_feature [331]..[331]: n is a, t, c or g
tttgggtcgtctgtgtgatttcctgcccctccccaatctgttctcctttcagcagctggtgtcatcctattaaaacatgaatgtgttcatattatgtccttactttgaactcgttcacttttttcaataagtggaatagagttcagagatcttccaaagctcactaggtcctgtgtgatatacccaacgcacctttactgccctgcccttgttctctttgctcaagcactactgagaactttctggccaatgaataagccacgctcttccctgccttagaatctctgatgttctcgcccaaatgcatggaaagctctcccccaatttattntcagtaggtttgggtgggactccaaaatctgcatttttaataacatctccaggtgtttttagtttgtttgttttataaacattcctgctttagaaaagagggcagcacatttgttctgtaaagggccaagcagtaagtatttttggttttgtgggccagacagtgcctgtcaagacgactcaacacttcccactgtagtttgaaagaaaccatggataatacataaataagtaggcatggctagtattcaataagactttatttacaaaaacagatttgggaaaaaaaagagagaaaaaggaaaccagatttggctgttggctgctgccc

SEQ ID NO: 5155 - DNA, 661 bp, Homo sapiens
  misc_feature [331]..[331]: Chromosome 16, SNP identification no. = rs4344763
  misc_feature [331]..[331]: allele = a, in linkage disequilibrium with rs13335346, respectively
  misc_feature [331]..[331]: n is a, t, c or g
taagtaagccactaataaccctgcttcctatgtcgttcctgcattctataaactcaatcccatgccttaatgcccacaatgggtctgggtactttaaatttcacatttaccagtgttaaaatatagcagcaggtaactatttctgaattttggactctcattttctggccccattgatggcctcatattctgactcccatattatgagacaacgtttttacttggaaagtagatatctcgaagctcattataagagatgtgctgagtcattcaacggtttgctgactcatcagaacagcttgggagccaccatgtccatgagccagctctnagcaaattacatcctccaagttaattagagctgatgttcatattcccctcttagaaagaaatcttaaggtccatttaatataaggagagtccactagcaaagcttgagttttcaaagaagtaatgatatgtcctaaagtctcatataatagattgaatacctgtcttctcacagatatgccacctttcccatggtgtagccaattctctccagggccttggcttatttagttcatttcttctagaattttagaagattctatctatacctacatatgtgactaaatatatataaagccttatggtacaattgactattggacagtggttg

SEQ ID NO: 5156 - DNA, 661 bp, Homo sapiens
  misc_feature [331]..[331]: Chromosome 16, SNP identification no. = rs7190907
  misc_feature [331]..[331]: allele = a, in linkage disequilibrium with rs13335346, respectively
  misc_feature [331]..[331]: n is a, t, c or g
atacagcagcaggtggaaacttcaggattttgtcaaattgtttatgtggaggcttatcagcagaaggggagatgctctgcctcatacatattagaaaataacagaaacaagacagttgagcttctgttcaaatttcagacatggaggaatttccctagactcaaaaccttatggaatttggaagaggttctgagtttcctcattgtattcctcatgcctgacacaaagcaggcacaataaatacttactgaacaaatgaatgaatggacaaatgaataaagagaatccagaactgatctggtgtgaataaatatgttaatatcaggtgaanatttttaggacgtgcaatttcccagttgtttggagacattcactttacctcccgggttggtgaagagtttggagcatgccaaggtcatgagcatgatggataatgttgcagcccaaatcataagtcacgatgtctcaacctaactgtctgttaagagtcactgactcagcattttacattaggagtaactgttgtgaacaggaactaggagaggataaaaagagttcacagctgagcaggtcacttgacagtaagctagcctggtgccaggcctttcctgctgatgtggagctctgccgtccacaaaaggaccctggatgggaatgtgtc

SEQ ID NO: 5157 - DNA, 661 bp, Homo sapiens
  misc_feature [331]..[331]: Chromosome 16, SNP identification no. = rs5029361
  misc_feature [331]..[331]: allele = a, in linkage disequilibrium with rs13335346, respectively
  misc_feature [331]..[331]: n is a, t, c or g
agagagaaaaaaaaaatatatatatatatatatctccccgccctgttaggacacagcaagaaggtgaccatctgcaagctaggaagagacccctcaccagtacctgaccatgctcacaccctgatcttagacttccagcctccaggactgtgagaaaacaaatgtctgttgttcaggtcactcagtcagtggcattgtgttgtggaggcaaactgatcaataacaataaatcaatgacgattttattgatcaagcatttattatgtactaaacactatgaaatccttcacataaattatttcatataacccttacaacactctgtaaaacnggaatagcaattatccccaatttacagattagtagactgaggtaaatcaggttaaaccactcacccagattacacatctattaagtagcagggttagggcactttttctccatttttgatggtacattggaatcacagacagttttttttaaattctgatgcttgggtcgaactaccaggggatctcatacagccaatgttcactagaggctgcatactgagatatttaaatcaggcaaggtggaggtccactgtgttagaatcacctggaaaacatgtaaagaaacagagacccacctcaccccagactaatttagtctataatccagg

SEQ ID NO: 5158 - DNA, 661 bp, Homo sapiens
  misc_feature [331]..[331]: Chromosome 16, SNP identification no. = rs9941093
  misc_feature [331]..[331]: allele = a, in linkage disequilibrium with rs13335346, respectively
  misc_feature [331]..[331]: n is a, t, c or g
gtacattggaatcacagacagttttttttaaattctgatgcttgggtcgaactaccaggggatctcatacagccaatgttcactagaggctgcatactgagatatttaaatcaggcaaggtggaggtccactgtgttagaatcacctggaaaacatgtaaagaaacagagacccacctcaccccagactaatttagtctataatccaggcactttcacatgtgaccatagtcataaatggatccttggtctgcctgactccaggtgctagacaagctaattcctagaatttcttaatttcaaatatttgcatggaggagttgttgagggtntatattctaatatccagatctgtatagctgaccaagggtggaaatcaagataaagatctaaaatggttaataggagaaagcaaactgaaatcacgattctctaagaattaactcaggagatggaggtaaatgtaaagaattccaaagaacatgattgactttgtgctgttgaaatattttgtgtctccctgagaaaacagccctctgagcgcagctggatattattttagttaggattttgcctgatgcatgaagatcaatcctatggctttccttgacacatatagctaaataggaccagtgactccaggtgagagctcaatacactga

SEQ ID NO: 5159 - DNA, 661 bp, Homo sapiens
  misc_feature [331]..[331]: Chromosome 16, SNP identification no. = rs4146391
  misc_feature [331]..[331]: allele = c, in linkage disequilibrium with rs13335346, respectively
  misc_feature [331]..[331]: n is a, t, c or g
cacagaggagtaaaaatcttagaacccacacaaataatagatggtaggataggccacctgatttgatgttgtttgctttgggctaattcaaaaaataaacatgtttttgcgtgtttttatttcttggggttctttttcttttctattttcttttaagcaaaaggaaaaaggaaattatggacaaaaatttagggaagattgttggaaataacattcacatcaagtctggtttttctcctaagagttatcccagtgagccactctatatattgttagactcaaaactggagccttatgcctcatccctacaacagaaattctcaggacctantttgaccaacaaggaaagtaccaagcctccctgggaagtactttcatacatccacctggaccatccaggaaacacctggaaatatcctcaatcctgaaaaaaaaaatttatggctgtttttccataagggcgtttgagaaatggaaggtctctttgataagccaatgccaaacaattcattgtgtggaggctgcgagtccagagcattgtttttctggggggcacaccatcaggaagctagctttgagcttttacctaaggcttggatggttggttcattcatccctctatgcagagttttattcattcatttaagacccttctcaatcg

SEQ ID NO: 5160 - DNA, 661 bp, Homo sapiens
  misc_feature [331]..[331]: Chromosome 16, SNP identification no. = rs4417561
  misc_feature [331]..[331]: allele = c, in linkage disequilibrium with rs13335346, respectively
  misc_feature [331]..[331]: n is a, t, c or g
gcaagataggaagttctagagaccagcgcaaaatgcaataattcaggagagatacgtgatgtaattcttaaaagccagaaagaaagaatcacacaccgtgcccatgtatttgaaacagtattctgtgtgattaatttttgaaaattagattagctggttgatgaccctttagacatcggccaatggccctgtagccctgaatgggttacacttgagtttggggtacttgttgttcttctctgcacagcatcctacttttcctggcgctttgtggatcttatgtaaagatccaaaaaaaatatagcagtctctgacattttctcacattcanaagtctatggccttttaaccttcttgcccttcagtggaaaaataggataggaaaagagtgtaagaatcttttaggtggtaaatgacaaaaatgcaaattccaaccggctttagcaaaaagggaagtttgctatttcctataactgaacactgggatgggcaagagctttctttgctgtgcatcctggcttcgcagatgggcttcgtagttgggatgtcttctaccctattccttgtcaccagccctttattcttcagattccagctgaccatgttgccaggaagctcatgggagcaccaagagcgtccaggtcttcttgcccttgaacgt

SEQ ID NO: 5161 - DNA, 661 bp, Homo sapiens
  misc_feature [331]..[331]: Chromosome 16, SNP identification no. = rs4438317
  misc_feature [331]..[331]: allele = c, in linkage disequilibrium with rs13335346, respectively
  misc_feature [331]..[331]: n is a, t, c or g
ggcaaacaaagcagcattcgagctgagccgtgtggccctgccacccgctccgctgcgccaggctctgtgctggggctgccatcctcaatagcctccttgttgcccatctcggcccccggaggttactaggggactctctccactcaatgggctccctctctgccattgtcttctgatatcggtttacagtctcaaggatatagactgcatcacaattagtcataatgtccagccagccctgaaacttatttgccacacagagttcattggcctttgtgacagggacaaagggaggcttgttggaagctgaacacaaaaggcaaacacaatntatggatttctgaataatacaaaggcgggggataatagctgctgcacaaatggctatgctattgaccagctagagggcccttcccccaagtctttctagcttttccatgaatttccctgacctggcccttcaagatttttctggcagcggggaggcaacctaaactaggcaggtaggctgatatagccagaagactggcttctgccgagaggatttgtctgtgagagatgggtggtgcgtgtttacggagcatgtcctacaggctctgtagaggatggtaaaatcatttctgaggtttaaggataaacaggtgcagatggatacatttga

SEQ ID NO: 5162 - DNA, 661 bp, Homo sapiens
  misc_feature [331]..[331]: Chromosome 16, SNP identification no. = rs4889064
  misc_feature [331]..[331]: allele = t, in linkage disequilibrium with rs13335346, respectively
  misc_feature [331]..[331]: n is a, t, c or g
tcagctcttactaactgtgcaatcttggacaaggtatttcatctgcctgagactcggattccatgtctaaaaaatgtggagaatgttcatgacctcatggtcattttgtgaagatgtgataagcgttagaaaattctagaagtctgtctaccaatggcatccctgagatgataggaattgtccttaggccatcaaagccttgcctgtaatcagggtttccatgtttcgttctccagatagtgcaggtaaacattgctatacccttagggacttgggaacatgccttaataataccattgcttacaatattcagtgaagtaagaaattatcncaatgtgcttaaaagaaacacatcttaataagacagtcagctttttggatcagcttttctccagaggaagttttctcagcttgcctgtccactggaatcactttagggtaatcaaacattacatgtgtctaagctccaccccggaaattgttatttatgatttattagttctgggtacagcgaacagggcacaggcaagggtggaaaaccacagctttaaaggagaacagtttaaacacatgttttaggatgtcttcctccttaagacaccctacccacacctactttttcttattaagatgtgtttcttttaagcacgtgtctataatg

SEQ ID NO: 5163 - DNA, 661 bp, Homo sapiens
  misc_feature [331]..[331]: Chromosome 16, SNP identification no. = rs10514478
  misc_feature [331]..[331]: allele = c, in linkage disequilibrium with rs13335346, respectively
  misc_feature [331]..[331]: n is a, t, c or g
tgacttcatcttaccttgatgaaaggccctatttccaaataagattacattttgaggtaccaggggttaggatttcaacatatcttttttttggcgggggggggggtcgcaattcaacacgtaacatccacttttcagaagactggcatccgtaggctttaaggcattttagtctccatcgagcatgagttaaattcatgcaagccacagcagaggtgagaaacaacattatttgtctgcattccccatacttatgattaataccatggtctgctattcaccatgtggtgagccaagggccatagccctccttcaactctagacctaacantctcagatgaatagaagaaagactggaagaaaagttgagtaaccattatctatatttgtgatgcaaatatagatacttttaaaatcccttctttatacactctgattgctttacctgcaggtttcctttaatgcaaaagcattgtttcagaatttcaaaatccaataatgagtctttccatttctcgtgctatcttccatatccaagattcataccttgtttctggccttctgctctgttaattgatccttccttatgggtgttcatttcatatcattctgtggtccactgaagtttacgagtggaaactttgattggatgtttttgcct

SEQ ID NO: 5164 - DNA, 661 bp, Homo sapiens
  misc_feature [331]..[331]: Chromosome 16, SNP identification no. = rs6564722
  misc_feature [331]..[331]: allele = t, in linkage disequilibrium with rs13335346, respectively
  misc_feature [331]..[331]: n is a, t, c or g
tccttttgtcatagacccatccatcactgaccaaggagcaaatccatttgagaaaggccgttctgcctgttctttagcccatgccctagacagaggtcttgactgggatctgttgagcccagaggacatcacagattttcctagatattgatccttccatggcacaaccattgttctcattgctaccactgacacccaggaatgtcaaccaagtgcctccactgcagaggctgggagcatgtggctgcctgtaatcccaagattcccatcctgattgcgtttcatctcattgcaggagctagaactcaatcgtgttcccctagaactaggncaatgtaaccactgctgccaccagcactggagaagggaaggggtcgagaagcccacgtgaagaggggccatggtaagttcatttatctcacccctctgaggctcaggaaaattaccttcaatcctgagtcctaaggtagcccttttcttctctgctctcaaagcctacctgctaaagaaagttttgcactttgtgcctcctggactcctggaccccaatagtcagtacctcccaccccaataaaaagatcctaaaacagttcacttctcaagctctgggggatttagtattttcattggtcactttgccgtaaaagtagaacaccaagtc

SEQ ID NO: 5165 - DNA, 661 bp, Homo sapiens
  misc_feature [331]..[331]: Chromosome 16, SNP identification no. = rs4426363
  misc_feature [331]..[331]: allele = t, in linkage disequilibrium with rs13335346, respectively
  misc_feature [331]..[331]: n is a, t, c or g
ctggaatctgggctggctttggcaaatcacttaaccattagaatggggtagaggggatattctgagattgctgaggttaggtcataaaaagtcctgcagcttctgcgtggggcccttggaacacactcgtgggatgctcccctttgaatccaagctgtcatgctgtgggaagcccaagcttcatggagaggcctgggggagatgcatcatgggacaggcccagctgagctcctagcccccagccaggatccactgccagttatgtgagggggccaactgggccgtccagtccagccaagccttcatgtctctgtaattccagtaactaccntgaaactgagacacaaacactacccaaagggtaaagtccatcataaactattgatggaagtcaccaagttttgggggtgatttgttatggagcaggagatcatcagaacacaatacaacatctctctgtcctcttagctttgccaattcctccttatttttcaattcagctattaccccctcagagggacctttctgacaaccctcaccgaaggttcctagacattctcctttctgctttcatagaaatttgcacgtttcattcatagcacttacagccattgataatttgcatttactttgtgattatttgtgattgtcttcctcacta

SEQ ID NO: 5166 - DNA, 661 bp, Homo sapiens
  misc_feature [331]..[331]: Chromosome 16, SNP identification no. = rs4580171
  misc_feature [331]..[331]: allele = a, in linkage disequilibrium with rs13335346, respectively
  misc_feature [331]..[331]: n is a, t, c or g
tttccacgccaaagccattaacagcgcacacacacacacacacacacacacacacaccacacacacaaacacacacccctccatggactctaaaacatggcccaggcaattcctcccgactaacctccatgccactctagctattcttctgctttcctgcctgctgcctttatataacaaaaatatgtttaagtcttgctaccaggtattacgagcttattatttattaggtactgtgccaagtgcattatactcattatctcatctaatcctctcagaagcctatgaggtacagagtatctcccaattacagatgagtaaattaaggcanaaattggttaagaaatttgcccaaagccatggagctaataagcagcagagccagtgttaaaaacaaaacagcctgggcgaggtagctcatgcctgtaatcccagcagtttgggaggccgagcggggtggatcacttgaggtcaggagttcgagaccagcctggccaacatggttaaacctcgcctctactaaaaatagaaaaattagccaggtgtggtggtgggtgcttgtaatcacagctactcaggaggctgaggcaggagaatctcttgaacccgggaggcggaggatgaggtgagctgagatcgtgccactgcactccagcctggg

SEQ ID NO: 5167 - DNA, 661 bp, Homo sapiens
  misc_feature [331]..[331]: Chromosome 16, SNP identification no. = rs4243198
  misc_feature [331]..[331]: allele = t, in linkage disequilibrium with rs13335346, respectively
  misc_feature [331]..[331]: n is a, t, c or g
actcttctatttagccactcactgattcaataacccacccagtaatttatccttccattcatgcacagaggcatccatccattcatccactcatcactcaccatttctgtactcagtcacctaatcacttttttactcaatcatctaaccacctattcacccaatccataatcccatattatgagccaggcactgctgttgatattggaggaacaagcatgaaagacatggttatccatttttctatccacccagcaacattccattgattagcatctattcatttatccactgtgtagaattttactcctgtgggcacttaattgagtangaggtgaatcccagggaggctggaagagagacatagggattaaccctgattcaagtccatgcagagtgcaatcagagtgacagttgggaaagacttgactaagagacaaaacctagacaagagacaagtcagagcttcggctatcaataaaaaggaagacattttgcaataggagtatatcagtatggaacataaaaagattcattcttgtacctaagttagccatagtgtatattaataaatggatttgagccttcccctgaatcagaaaaatttgaaaaggtgtctaggtaattcagacagtttcatttattcatctattcatccttc

SEQ ID NO: 5168 - DNA, 661 bp, Homo sapiens
  GARNL4
  misc_feature [331]..[331]: Chromosome 17, SNP identification no. = rs9890608
  misc_feature [331]..[331]: allele = a, in linkage disequilibrium with rs8080237, respectively
  misc_feature [331]..[331]: n is a, t, c or g
gtgtccaagagcctaatctttcttggtggtgtgacaaggaccccgttttgagctgagctcaggagaaagtcccataatagcatggggctggagggagtggccttccctgcctggagctggtttggaaggtgtgggtgaaggtgagaagaagggtcagctgaggactctcagaaggcttcctgtgagcgctgggtggatgctggtcccattcatggagacggagaactagcgagtttgggcagtttgggcggggaaggagggagtaagactctgaatgtaaaatcttccctccactttccactctcctgtttggtctgtctgagacccaccntatacctcctgccctgtggaagggggcagaggagagagcagcatcctgagggccgtgggggctggtctgcggcctgggaagcagctgcacggcgtcccctcgctggcccggctcggctcctgggtgcctttggcaggtgagttccaggtgagcactggccggtgtggccgcccttgtgactgacagctggccacaccacagaacccactgttagataccctccaggtgggtcgaggagaatgtgcccatttctgtcttgagtggcagactctggttcgttgatttcttcaggatgggccctgtgcctgaggacagtgttggcatgtgtgg

SEQ ID NO: 5169 - DNA, 661 bp, Homo sapiens
  GARNL4
  misc_feature [331]..[331]: Chromosome 17, SNP identification no. = rs4790365
  misc_feature [331]..[331]: allele = a, in linkage disequilibrium with rs8080237, respectively
  misc_feature [331]..[331]: n is a, t, c or g
ttcaagtgattctcctgccttaggctcctgagtagctgggattacaggcatgcgccaccacacccggctaatttttgtatttttagtagagatggggtttcaccacgttggtcaggctggtcgcaaactcctgacctcgtgatccgcccgcctcagcctcccaaagtgctgggattacaggcgtgagccaccgcgcctggccaacaaaagtcaaattagtctttatgcaaatctcctgtgcccctaaaactagtcacccaggctgagcttggttacctgtggggacagtgagctcattaccttgtatggatgcctattttattgtagtacnactttgctcgaagctgaccgctgttttcatctggaatctctgtaactgcattgctcggtccagtcttgacccttggcccgcacgtccccacttacccccattcaacaaggttcacccctctttccactaagagccctgcagacactggaaggctgctttttcaccctgagtcttcccttccctccccttggctggtcaccccggcctctgcagctatatttgggattcctcacctgcctgggctgatctttgtcggaagggttcaggttttgcaggcaccctgcaggagccccatggacacgaggatggacagctagaggcgatgggcct

SEQ ID NO: 5170 - DNA, 661 bp, Homo sapiens
  GARNL4
  misc_feature [331]..[331]: Chromosome 17, SNP identification no. = rs8071247
  misc_feature [331]..[331]: allele = a, in linkage disequilibrium with rs8080237, respectively
  misc_feature [331]..[331]: n is a, t, c or g
taccaccccccccaaccccaacacccagctcattctgagagggtggagtgggcggaaatccgtgcctggcagaccacaaagccacataactgacttttgtagccctgccctggggtgttgggggggagggttgacggcagccattgcccctttcttcggtgctttgccaccagcagacgccccgtggaattgaggagctttgttctacgagctcgggaacgggacttgggagggacagcccctgtcccaccctgccatgccctgttcaaccctgtcaggcagctgaacgtaggctggacccatggctgcccaccctggctgcagtacagantcacctaggggacctcgttaaaatgcagcttccggaccccaccctggggcttggggattctgcctcatcagcctgggtggggcccaggaaacctgtgtgttaccagcgctgaggtgctgctgatgaggcagctggcttcacagctgcacgggaaccagtgccgtttaaagcactttcccccacagtgcggctccagcagtcaggttcacgtactctgggtgacctggggcaggctgcgcaacctctctgtgccccagtttctttgtctgaggataataacagtacctgcacgtgggtgcgcttgttgtgaggcttaaatgagattatcca

SEQ ID NO: 5171 - DNA, 661 bp, Homo sapiens
  GARNL4
  misc_feature [331]..[331]: Chromosome 17, SNP identification no. = rs11653110
  misc_feature [331]..[331]: allele = t, in linkage disequilibrium with rs8080237, respectively
  misc_feature [331]..[331]: n is a, t, c or g
ccccaacacccagctcattctgagagggtggagtgggcggaaatccgtgcctggcagaccacaaagccacataactgacttttgtagccctgccctggggtgttgggggggagggttgacggcagccattgcccctttcttcggtgctttgccaccagcagacgccccgtggaattgaggagctttgttctacgagctcgggaacgggacttgggagggacagcccctgtcccaccctgccatgccctgttcaaccctgtcaggcagctgaacgtaggctggacccatggctgcccaccctggctgcagtacagaatcacctaggggaccncgttaaaatgcagcttccggaccccaccctggggcttggggattctgcctcatcagcctgggtggggcccaggaaacctgtgtgttaccagcgctgaggtgctgctgatgaggcagctggcttcacagctgcacgggaaccagtgccgtttaaagcactttcccccacagtgcggctccagcagtcaggttcacgtactctgggtgacctggggcaggctgcgcaacctctctgtgccccagtttctttgtctgaggataataacagtacctgcacgtgggtgcgcttgttgtgaggcttaaatgagattatccaggtgaaatgggaaca

SEQ ID NO: 5172 - DNA, 661 bp, Homo sapiens
  GARNL4
  misc_feature [331]..[331]: Chromosome 17, SNP identification no. = rs8080237
  misc_feature [331]..[331]: allele = c, t
  misc_feature [331]..[331]: n is a, t, c or g
ggtgatccgcccaccttggcctcccaaagtgctgggattacaggcgcgagccaccgcacccggccccatttccgatattaacaacagtcctgggctgtgcggtcacacacgtgtaactgtgcgatgtgccctcgtgcctgcaggcgtacctacgcaggcacactgagcattgtgtaccgggacccaggcctccctgctgaggacagagcatccctgtggtacatgcgtggacgcagtcactggctggacgtggtcagaagggcagacgtgtgtgtacacaaggcccagacaagcgggtttttatttgattcacactctgaccttattcctngagttagcagcacctgggctgagctctgggagcccaaggtgccccttgtttccatagcaaccataatctggtaaaaataggcgggggagggaagagctggaagaggcccgagccggctccgggggcatcctgcctgctaaggtccttttttccacattgctgaccatacagaggtgctgttttgttttgttttttttttttcttaggataatgacatgcaaacctctgagtactcatgactcagaattgacacttgttaacattttttctcattttcatcaaaccctcttatttatttatttatttttgagacggagtctcactctgtcg

SEQ ID NO: 5173 - DNA, 661 bp, Homo sapiens
  GARNL4
  misc_feature [331]..[331]: Chromosome 17, SNP identification no. = rs9902395
  misc_feature [331]..[331]: allele = t, in linkage disequilibrium with rs8080237, respectively
  misc_feature [331]..[331]: n is a, t, c or g
tttttaattatactttaagttttagcgtacatgtgcacaacgtgcaggtttgttacatatgtatacatgtgccatgttggtgtgctgcacccattaactcttcatttaacattaggtatatctcctaatgctatccctccccactccccccagtcccagcactttgagcggctgaggcagctgtgaggtcaggagttctagaccagcctgaccaacatggtgaaaccctgtctctactaaaaatacaaaaagtagccgggtgtggtggtgcgcatctgtaatttcagttactcagggagtgctgcttccttggggtgaggcacagccctgnggcgagtctcttggtaaagtgaaaaatgctgtaaatgggtggctgagatgggtgcagaggattggggtgtcatggggatggcgggtggcatggggctggcttccggatacctcatccctgacattttctctgttgacattggaacccaggatgtccagatgctgtttttgaagccctatcggccagggagtcaatgggcccccactttgcctgggagggctgtgtcctggtgtcctgtggggttttggtctcccaccccggggcctaagggcctcagaatgaactggaacccaacctttgtcaggggagccccagcaatgtctgcacgac

SEQ ID NO: 5174 - DNA, 661 bp, Homo sapiens
  LOC440420
  misc_feature [331]..[331]: Chromosome 17, SNP identification no. = rs8076714
  misc_feature [331]..[331]: allele = t, in linkage disequilibrium with rs2945379, respectively
  misc_feature [331]..[331]: n is a, t, c or g
cactatgggaaagagcccctcaagcacttggtaggacattgaggcgtgcattgagggcgccaggatgtgcggggactctggggtgaggatgacatattcgtattctgactccattccttgccagctctgtgaccttgggcaagttctttagctctctggacctcagttttcttgttagttaaaaggggataagagtaggttaattttggattcttttgagaaccaagatacagaaggagtgctggacagtgcctggtacttagaaggagttcagtgtttcccccactgtcccccgcctttcacgtagcattactccaaaacacttttccangtttccctattatcttccttttggtcattttagttgccacatgagagtgtgtctagtggatctgctgtaatttggcaaagcattttccgtgttattggacatttcagtagtttctagatttctgcaattataaacaatgtgaatggaatcgtctttatataggcgctttatttttgttcctattctgaatttgttttcttgggataattcccaggaatggaattactggatcaaagagcatggagatggagtgtgtgtgtgtgtgtgtgtgtgtgtgtgtgtgtgtgtgtgttaagacttgccaaactgttctcccattttttttttttt

SEQ ID NO: 5175 - DNA, 661 bp, Homo sapiens
  LOC440420
  misc_feature [331]..[331]: Chromosome 17, SNP identification no. = rs10853147
  misc_feature [331]..[331]: allele = t, in linkage disequilibrium with rs2945379, respectively
  misc_feature [331]..[331]: n is a, t, c or g
tgcacggaactgtgctctgtgctgtcagccttcaccgtggtaactgaaactcagttctctgatgtaaagcctggcagtcccggcctgcttgggggcacctggacccctgccagggaaggggtcctcagacttgaggttgccagctcagatgtggggctgctgatactaggtatgagtgtctaggctcccagttatgggaaacaagaccaagagacagccatgggaaacccccttcttactgagctgcctgccctgaccctttctcccctgactgcggactctgatttgtggctctggttgggaatgtagatttggggacattgtgctcctnatgggtttcttcccgtaggatggggcaaagaaggggttatgagattgagcagatgcttctgggagtctagagtgtactcacatagcgaggtgtggacctcatgagagtgcctggaaatagcctggtggaagatgttggcaccatttcgtttggaggaggctgaatgactcataagccccggggggctctgatgtcattgaattaggggcctcctttgaccagggttaaccagcaccttgggttccttgcatgtaagcttgttgctattaaataaatgggaagtgggctgggccccgtggctcatgcctgtaatcccagcactttgggagg

SEQ ID NO: 5176 - DNA, 661 bp, Homo sapiens
  LOC440420
  misc_feature [331]..[331]: Chromosome 17, SNP identification no. = rs2140224
  misc_feature [331]..[331]: allele = t, in linkage disequilibrium with rs2945379, respectively
  misc_feature [331]..[331]: n is a, t, c or g
tcctcataagccaccaggccaaccacacaaaaaaagcttcctgtcccctaaaaagacaagtttccattcgttgatggattcttccttgttctgttctgtcccctgtgccacggtgagtcatggccaccacagggactctccccagggactcgtcaccttctttctcctaaaatgtaccaccagtatttaaaataccgctgtgcctatcaccatcacacccaagcactacctgctatgttgcctttgtagctagaacccttccaagcagaggcaaaattatttgaggtgatcagataaagtcctctgcctgcctgctgcccaaaccccagcnctacaggctgctcctcacaaggatgcccctctcccaccttcctgctcagccagaagcccccacctcttgctttgcagcctcctttctgcgaatggccacctgttaatccagatccccacgctctgttacttcatcctgtctccaactgtgagggactcccattccaatgatgcgaaaaacgagactgccaaatccatttccacccagcattacttcttctaaaatgctaagcatcaccaaagccttgtattatctctttctgccctgaacaagacccaagatcaagcaaatttctaaagagggcaatgaaatgaacacaaatggaaattc

SEQ ID NO: 5177 - DNA, 661 bp, Homo sapiens
  LOC440420
  misc_feature [331]..[331]: Chromosome 17, SNP identification no. = rs12452983
  misc_feature [331]..[331]: allele = g, in linkage disequilibrium with rs2945379, respectively
  misc_feature [331]..[331]: n is a, t, c or g
atggtgataggcacagcggtattttaaatactggtggtacattttaggagaaagaaggtgacgagtccctggggagagtccctgtggtggccatgactcaccgtggcacaggggacagaacagaacaaggaagaatccatcaacgaatggaaacttgtctttttaggggacaggaagctttttttgtgtggttggcctggtggcttatgaggagaggtgaacatttgagacaaaaccccaggccactcttccagctgcatctttgacaattttgagagttttaggaagtagttaaaaaaagaaaaagagaaaccaaaagccaaagacctcntttactcacaatacctgtgtacagccagccatgtgggctgcgatcggccatgtgtctagaggaaactccttcacttgcatccctccctcctagacccctaaaccagagggggcttttgactattcttagaagaagacttaggcggcctcaaatgaccagaccttgtctcaagcatctaacagcttaggccaaacttcctctctggccctgtttggtttaagcagtttcctggtctggcaggatttgttatcttagcacccagcttgtcaaagccgtagtgctacttgttatagcaaacaggcccctgtcaccctgtggctgcaagccagg

SEQ ID NO: 5178 - DNA, 661 bp, Homo sapiens
  LOC440420
  misc_feature [331]..[331]: Chromosome 17, SNP identification no. = rs11651276
  misc_feature [331]..[331]: allele = g, in linkage disequilibrium with rs2945379, respectively
  misc_feature [331]..[331]: n is a, t, c or g
ctcttccctccctccgtgctcctccctccatccatgctcctccctccatctatgctcctccctccctccatgctcttccctccatccatgctcctctctccctctgtgctcctgtctccctgtgtgctcctccctccatccatgctcctccctccatccatgcacttccctccctctatgctcctccctccatccatgctcctccctgcatccatgctcttccctccgtctgtgctcctctctccctccatgcttgtgcatctgtgctctgcccctcctcccccatccatgctcctcccttcatccgtgctcctccctcatcctggagtgncagacccactgccaatcttatgtgagttcacataacccacatcaataaggcgagagcagatgggtggctgggttcccgttctcgctgcagcatcccaggttgcacccctcacctctctttgctcttccttttgttccttctgaggcgggtgtagggaagggaggaaggtgccgctcctagtgcaggtgacagggatgggctgctctgacccacactggccctccacctgctttctttgctcagttgagaccccttcatctccttcaagtgctgcaggacatgagacagacgcttggacttcccttgagagctgggcatcccagacctctg

SEQ ID NO: 5179 - DNA, 661 bp, Homo sapiens
  LOC440420
  misc_feature [331]..[331]: Chromosome 17, SNP identification no. = rs8069590
  misc_feature [331]..[331]: allele = a, in linkage disequilibrium with rs2945379, respectively
  misc_feature [331]..[331]: n is a, t, c or g
gtttttattatttacatctcttgactttgttttttggtcaaatatgccagagacatgaaaccatatacctcaacaaagtcctgtaagttagatactcagctttgtttacacttcaggtagtttttttttcttaaaatagaaattttatttttgggaatttttgtgagtttcgtgattcacatactgctgtgagttactgcttggactgctaggttgggaggctgtagacctgggtctgccgtgaactgcttttgtgacccagcgtcctgagccccagttttcttgtttgtggaaacaaggtgagggaattggactggctgatttcttctgnagtctctttcaattctttaattctgtctctcatgggccaaactcacagagatagtaatttaagttcatagcacatacgtgccatattttagctgataaggcatgctgcaccttgtacataagatacacgtaggtactgtggcccttcaatcacgagtcagcctcatggcttcctgtcgtgtggttgtggactgtggagccaccagccttcctgcttgactctctggtgactgccagcatgatgagtggggccacctgcacttatatagctatctccatgccatggaaactcatccttttgggggttcagcttcagggggtgcagtggttt

SEQ ID NO: 5180 - DNA, 661 bp, Homo sapiens
  LOC440420
  misc_feature [331]..[331]: Chromosome 17, SNP identification no. = rs4795684
  misc_feature [331]..[331]: allele = g, in linkage disequilibrium with rs2945379, respectively
  misc_feature [331]..[331]: n is a, t, c or g
gccaccagccttcctgcttgactctctggtgactgccagcatgatgagtggggccacctgcacttatatagctatctccatgccatggaaactcatccttttgggggttcagcttcagggggtgcagtggttttaggttacatggatgaattgtagagtggtgaagtctgggattttagtgtacccatttcccaagtagtgaacattgtactccaatatgtagtttttcattcctcacctccctcccactgtcccttctcctgagtctccactgtccattataccagaactgtagattttattgccagagtttgaagctggtgcccttggnctttggagacgatttggtttaaatcctgagtgctatgatgctagttgtgttcattgattggactctgtatgttgaaccttaatttctgtcatccatcaaatgagggcaacagcttctctctgaatgtttttgagggttaaatgttatagcgcatgccagctgcttagtaaaaagcataaatgttgttggtggtgctgagaaagaagaactattatgatgtgggggtaaagaacatctccaggccaggcgtggtggctcatgcctataatcccagtactttgggaggccaaggcagcaggatctcttgagaccaggagttcaagaccagtc

SEQ ID NO: 5181 - DNA, 661 bp, Homo sapiens
  LOC440420
  misc_feature [331]..[331]: Chromosome 17, SNP identification no. = rs8076061
  misc_feature [331]..[331]: allele = t, in linkage disequilibrium with rs2945379, respectively
  misc_feature [331]..[331]: n is a, t, c or g
ccctggggagcttgaggtcctgcgagggagggagggcgggcaggtgcacagagagggaaacagcctgcctgccttggggctaggggtcaggatctgcctctcagaggagccgaagcttgaaccttcttgatcagaagagcacggaggatgctccaggcaggggattaaccggggagctgcgcagtgttcgtagtggctgcagtgtgcagggagtggtacatcaaatctgtaaaatgtgtctcagagctttattaggaagtgtatgtgaataggctcctttaccaacactgtcctccccacggagttggggatggaagattatccccacttntacaggtgaggagacatcccagagaggttaagacagtttccccaagagggttattggtcaagcctggattgaacctggcttcctatacctggcccacttccccagcctggcaacactgcccctgcctaatacaagagagtccaccagctctcgggccatggctgtctgtcatgggggcaagtatgcccaccctggactgttctcttctctcacatgagtcatctcctgggttgtcagcctggcatggtgtccacatgtgggctgatgggtcaccaggacccttggtctgagctgaggcagagagggcagggtgatgggtggatgctaggc

SEQ ID NO: 5182 - DNA, 661 bp, Homo sapiens
  LOC440420
  misc_feature [331]..[331]: Chromosome 17, SNP identification no. = rs953113
  misc_feature [331]..[331]: allele = a, in linkage disequilibrium with rs2945379, respectively
  misc_feature [331]..[331]: n is a, t, c or g
tgaggccaggagttcgagaccagcctgggcaacgtggtgaaaccccatctcttttaaaaaaaaaaaaaaaaggtttatttggctcacagttctgcaggctgtacaagcatggctgtacaaacataaattttatggtttttttttagaggcggcgtctcaccctgtcgcccaggctggagcaagtatagtggagcatctgcttcacttctggtgagacctcaggaagcttttactcctagccgaaggtgaagggggagcaggtgtgtcatgtgtctagacagagaccgagagaggaggaggtaccaggctcctttcaacaaccagctctcanctcttgcttgaactaatagtgtgagaactcacccatgacggtggggacagcaccaagccattcatgagggatccacccccatgacccagccaccttccaccagacaacacctccaacatcggggaccacatttcaccatgagacttggaggggacaaatattcaaactatatcacatacccagtcccactgcctcccagtgtccctggtcagaggcattcataacagcttttagagattttttgtgcatgtgcacccataaatgtgcacatgtgttccagcctttaaaatttttgaattgtgaaatatcatacattcaaaacatatataa

SEQ ID NO: 5183 - DNA, 661 bp, Homo sapiens
  LOC440420
  misc_feature [331]..[331]: Chromosome 17, SNP identification no. = rs8070481
  misc_feature [331]..[331]: allele = c, in linkage disequilibrium with rs2945379, respectively
  misc_feature [331]..[331]: n is a, t, c or g
gcttttcttcatcttcctgcagtggggaatgaggcagggggcctggtttgggggttcaagcccaggccacttgagcttttgagacgaggctccttgtttttctttgcttgctccatctgccactttcccttttctcttctcttttgttctttctccttttctctttcttcatcccctctttagactacaattcctggtaaccctggctcattcttccatccgtgtgtacaaaagttctggctcttctctttctcccccatctgaatgagatttgggggcagtagagtgaaagtcagagacagtgaattggaggttggggccctagcctgcntttgcttcttctctcccctgtggggctgctcttcttggtatcctcactgcctcctcattcaggtgtgtggctgtgaaatgagaccagatctgcccaggaggaggtcatgaagaatccacagtagggaagatgggggcccaggggttgggaggtggctgggaggtccgcagggagaaaaggaggggcagctgcgttctcaaaaatgacagtgtttccttgcttcaccaatctgggcagaaagggctgacccagaagcttgttgcatacaattggttcaaagaggccaacaggccaagatctggaagcattgtgtgtgtgcatgtgtgtata

SEQ ID NO: 5184 - DNA, 661 bp, Homo sapiens
  LOC440420
  misc_feature [331]..[331]: Chromosome 17, SNP identification no. = rs10083891
  misc_feature [331]..[331]: allele = a, in linkage disequilibrium with rs2945379, respectively
  misc_feature [331]..[331]: n is a, t, c or g
tgccttgtttttgccctcacaggctggctccagggctacactcctgctatactctgctcaccatctgttaagggagcagttggtaggctgtgagcagcgcctgcctccctcccatgtctaatttaaccagtcacccttctctccgtcggcctccaccaaggctgtgggatcattctttaattacttacaggggtcagtcacctgatgggacgcctttgctggagacagacggtactgacaagcagattagttgcacgttgggaggtgggaggagggaggagacgaggagagtgtgtgtagcagatacgagtgggtggcttcaaaatagaanttcatgaaggctctaggaaagtaattttaaacactgttcatttagaggctgtggttcaggggtgagcaaagctggaggcagcccacccagcacatgttgaccttgctttcccgtcagacttgggagggaggaaggcaggagtctcctcaactcacctttgcagagctctgaaactgggtctgttcaaagttacacctgctcgtttcttgtgcccgtgaattcctttctaggaatgatcaggcatccataggcaagatcttcctcgagagtcaatagacctgagcccaaatgtcagctctgtgtctgagctgccatgtgaccttggacaag

SEQ ID NO: 5185 - DNA, 661 bp, Homo sapiens
  LOC440420
  misc_feature [331]..[331]: Chromosome 17, SNP identification no. = rs9332455
  misc_feature [331]..[331]: allele = g, in linkage disequilibrium with rs2945379, respectively
  misc_feature [331]..[331]: n is a, t, c or g
cagaaaagcatagtttatatgtgtgcttgtctttatacaaggctctgtgtgtgagtgtgactgtgggtgtttatttaactcaagaaaagtccaagggacccctcacacagaggaggtgaggtgcattggacaacctgggccaggacttggaggacatgtctgccccgatgatgacttaggcccagtcccttagtatccttgggatatagccccctgatctgccccaaaggtggagttgggcgacaggagggaggcttggagatcatttctcgtgtcccttccagctctgaaatctgtgagcaatgttgtccagtaaggctgtctctaccangtaacacatgactgccaagtgggtattttaatcactgtgatttcagaataacagggcgagctctcacagagcattcattgcttcatcgatcatgcagtccctgtggaacctgagttgatggcgggtctacagtcagttcagtttacttgtagctgtcattgatcaggtgcaaacatgcttttcaaagcctggaatcattttttttaagttggatcatatttgcttattataattggtaaaatttgagtgttgcccctaggctctcagagggaacagtttggaaagtgcttccttccaagaagagacgagatggtactgcgcataagcctc

SEQ ID NO: 5186 - DNA, 661 bp, Homo sapiens
  LOC440420
  misc_feature [331]..[331]: Chromosome 17, SNP identification no. = rs17778066
  misc_feature [331]..[331]: allele = t, in linkage disequilibrium with rs2945379, respectively
  misc_feature [331]..[331]: n is a, t, c or g
gctctgtgtgtgagtgtgactgtgggtgtttatttaactcaagaaaagtccaagggacccctcacacagaggaggtgaggtgcattggacaacctgggccaggacttggaggacatgtctgccccgatgatgacttaggcccagtcccttagtatccttgggatatagccccctgatctgccccaaaggtggagttgggcgacaggagggaggcttggagatcatttctcgtgtcccttccagctctgaaatctgtgagcaatgttgtccagtaaggctgtctctaccaggtaacacatgactgccaagtgggtattttaatcactgtganttcagaataacagggcgagctctcacagagcattcattgcttcatcgatcatgcagtccctgtggaacctgagttgatggcgggtctacagtcagttcagtttacttgtagctgtcattgatcaggtgcaaacatgcttttcaaagcctggaatcattttttttaagttggatcatatttgcttattataattggtaaaatttgagtgttgcccctaggctctcagagggaacagtttggaaagtgcttccttccaagaagagacgagatggtactgcgcataagcctcctttagggttgggtctttatgcaggcagatagtaagtgctt

SEQ ID NO: 5187 - DNA, 661 bp, Homo sapiens
  LOC440420
  misc_feature [331]..[331]: Chromosome 17, SNP identification no. = rs9910137
  misc_feature [331]..[331]: allele = g, in linkage disequilibrium with rs2945379, respectively
  misc_feature [331]..[331]: n is a, t, c or g
cagggcgagctctcacagagcattcattgcttcatcgatcatgcagtccctgtggaacctgagttgatggcgggtctacagtcagttcagtttacttgtagctgtcattgatcaggtgcaaacatgcttttcaaagcctggaatcattttttttaagttggatcatatttgcttattataattggtaaaatttgagtgttgcccctaggctctcagagggaacagtttggaaagtgcttccttccaagaagagacgagatggtactgcgcataagcctcctttagggttgggtctttatgcaggcagatagtaagtgcttctggaacgttntgagttctgccccctactccatgagccgccgcaagatctggcttgttgggacctcatgggccagtggtcaggcccagcattatgaatctcttttggccaagttcctgggataggcctgtttcttctttaataactgcagtgtgaaacaagtcttattttgagtaagagagtgaggccccgggtggcgtttttgtgtttgcctaagggagatgcctcatctccagccacccagatgtgactggagagagccatgatgctgcttttgtttgtctctaattacacttaataagatgggggcaagggaggaaggcataagagtgccatagaaac

SEQ ID NO: 5188 - DNA, 661 bp, Homo sapiens
  LOC440420
  misc_feature [331]..[331]: Chromosome 17, SNP identification no. = rs9303652
  misc_feature [331]..[331]: allele = c, in linkage disequilibrium with rs2945379, respectively
  misc_feature [331]..[331]: n is a, t, c or g
tgagttctgccccctactccatgagccgccgcaagatctggcttgttgggacctcatgggccagtggtcaggcccagcattatgaatctcttttggccaagttcctgggataggcctgtttcttctttaataactgcagtgtgaaacaagtcttattttgagtaagagagtgaggccccgggtggcgtttttgtgtttgcctaagggagatgcctcatctccagccacccagatgtgactggagagagccatgatgctgcttttgtttgtctctaattacacttaataagatgggggcaagggaggaaggcataagagtgccatagaaacnccaatttcccctaaaattagaaaccctgaaactcatgagttgaatagaaaaacctagataatttgccgccccctttctctattttgttcaccttgctggctgattctgcctgattttaagtatttgaaatatgtctcagccagattttctggtcctctttcctcacctctcccctcccttccaacagaagggaggcccccatgtggtcttcttgcctagctgggcctcctgtgccccagagcgagaatctgagaacgcaggaattgggttgggactgtgggaaatttgcatgtgccatggtaaccagcaaggggatcctgggggatctca

SEQ ID NO: 5189 - DNA, 661 bp, Homo sapiens
  LOC440420
  misc_feature [331]..[331]: Chromosome 17, SNP identification no. = rs2008032
  misc_feature [331]..[331]: allele = t, in linkage disequilibrium with rs2945379, respectively
  misc_feature [331]..[331]: n is a, t, c or g
gcattggaatttttaaaatgcgcctcaggtgatgcggttgtgtgggcaggtggagactcactggctttgatggagactcttagggaaactttaacgaacatgtgggaatgctttgaggaagaagcaaagggcggcatgaggcactgaaagaaatgagtgcagctgcagaggaaccctcagatctgagttaggttttgaggacttctatgaaaaaatggaattagaagtcaagtaagccagggtgagtgggagagcagcaccagcctgttggttttagagcagggccaggagggttaacagcttcaggatatgccaagggcatcagaagggntcttgaagatttgttcagagcaagaggaacaagggtgcgatcagcctgaggcagaagccaagcaatacaccattaactcagggaggtggagggaagcagcgcctctctgttttctgttgggcccctgggcagcaagtgtaatccaaccaggagcaagagggaactgaggcagaaaccacagtctgctttaaatgaagtccacccctaggacttattttcctgggcacttgggaacctggttattaccatcacagggtggttttatcagtcaattgaagtagctaagaagggagatcaaggcaccggacaaccagagggggcaaaaattat

SEQ ID NO: 5190 - DNA, 661 bp, Homo sapiens
  LOC440420
  misc_feature [331]..[331]: Chromosome 17, SNP identification no. = rs7208616
  misc_feature [331]..[331]: allele = g, in linkage disequilibrium with rs2945379, respectively
  misc_feature [331]..[331]: n is a, t, c or g
ttcagggaactcttaccttgagagggattgggacgggagccctgggacagctctgatagcacctgtggaatcagtacctgctgactatggccacgggctatgacacttcaggaggatagtccgtttgaatcctctgggagctggccagtgagagggagctgttctctcacctcctggttctgggtgctcccagaccgaggggttgacctgaactcgttgtgggctctacagtgcaacccgtttgcccctgagatggccatcccccagggtccacaggcctgcgcatgcatgcttcctgtgactctgccccttctctgtcctcattaacccnggagggattagttcttcatccaagaaggtgcctgcctgcagtctccacctgagctgggtgatttgctcggatgcaggcagcagaggtttgttattagtgctctaagagaggcaatacggcaaacagccctgctctggagccagactgcttgggtttgaatcccagctttgccactccctggctgtgtggtcttgagcaagctgcgatctccctgtgattcagttgctttatcagtaaaatggggatggtagcagtatctccctcaggagagttattgtgcgtcttaaataagttagtgtaattaccataggcagaatgcttataccagtg

SEQ ID NO: 5191 - DNA, 661 bp, Homo sapiens
  misc_feature [331]..[331]: Chromosome 17, SNP identification no. = rs8075860
  misc_feature [331]..[331]: allele = g, in linkage disequilibrium with rs2945379, respectively
  misc_feature [331]..[331]: n is a, t, c or g
ctcagtttccctcatctctaaaagggagtgttggtggtgataaaacttattcactgaagagttataaggaccgagtgagtagacgtaaaaaggcttggttgccaataaagcatgaggtaccagcatgagtggtcattttgtgtagtttaatggatggtttttagacacgatgaaattggaaagagtgtgggagctagagagaaatctaagtcctaacaccgaagagctgagtggccttagcttaaggtaatttaggtaacttaacctccccaagcctcagtgccatcgtctgtgaaatagggcatttgagaggatttgagtgaggctgcantgccgtccgttcagagcagatgctctcttgctggttcatttttccaaatgcatgggttgggggtatgatgtgcttggcagaagcctaccaagaatgcttatctaatgtcttttaaaagtgtacagataaccatttcctggctcaattctctgcagcaaatgcactttgatcctcctctgagcatcccgcattgcctgccaggcacccttctgagccagagttatcttggtatggagcgccgtaccacccaggagccatgtagcatgttccccattccttgattctcacaactgtcttgagagcagggagaaagctattatccccatctga

SEQ ID NO: 5192 - DNA, 661 bp, Homo sapiens
  misc_feature [331]..[331]: Chromosome 17, SNP identification no. = rs2948546
  misc_feature [331]..[331]: allele = a, in linkage disequilibrium with rs2945379, respectively
  misc_feature [331]..[331]: n is a, t, c or g
caggagaatggatagaaaaattgtgctaatcagtcaatcgaataacacacagcaatgaaaatgaacaaatgacagctacatgcaacgaaaatgcacagatttcacaacaatgttgcatgaaagaaaccagacactaaagaatatatacagcatgattatccttgtaggaagttcaaaaaacaggcacaactaaatttacagtgtttggggattcatattttgggtaaataattattttaagaagcagggaggcaactactactaaagtcaagctaatgttgtgcgtggcagtaagagaagaggtcatgatcagggagcctccgggggcgcnggcagggttccttctcttggacggtggttacaagggtactcactttgtgataattcaccaagctgtacatttatgttttgtgtacttttctgagtctgtataatattttacaatataaacaaagtaaaaatgaaaaggaatgatgtctagatccaaacaaacccagcctaccgtaggttctcaatacatctttttgtttgtttggagacggagtcttggtctgttgcccaagctggagtgcagtggcgtgatctcagctcactgcaacctccgcctcccaggttcaagcaattctcttgcttcagcctcccgagtagctggcattacaag

SEQ ID NO: 5193 - DNA, 661 bp, Homo sapiens
  misc_feature [331]..[331]: Chromosome 17, SNP identification no. = rs2945411
  misc_feature [331]..[331]: allele = a, in linkage disequilibrium with rs2945379, respectively
  misc_feature [331]..[331]: n is a, t, c or g
gccttacaaggcccagaagtgagttctgcagcccagggcatggtgagaggaaccagggcttcaggatcaagcaagcctgcagcaagcgcagccctgccactcttctaggcaatgtgaccctagacacatcacccaacacctgagcggtcacttcctcacagctactgtgctatgcagggctaatgatgcacacatcctactccaggaaccagccagtgcaggccacaacaaatgccagttccctggagggctctttccctgtctttttcccaccacggcacaatggagggatatggaacatttccagcactatgaaggctatgcctttggnggagagggaggagggtctagggagtgtccaccatttatcctctcctttgagcatcgcagccttaagctttcccgactcctgccaacacagtgcttgctcctacgtccactttcccacagaacttgtcagcacagaacatcaattatcaacatagatgtccaccgacccagattgcaagagcctggcaaggtcaggctctgagctccccgacacagtgccttgtagagagggggcactcagatgatgaatgggcactgggtgggcaggcagacagcaaacaccagagttaacagaaaccaattctatgcttttcagggggtgagctacact

SEQ ID NO: 5194 - DNA, 661 bp, Homo sapiens
  misc_feature [331]..[331]: Chromosome 17, SNP identification no. = rs878028
  misc_feature [331]..[331]: allele = a, in linkage disequilibrium with rs2945379, respectively
  misc_feature [331]..[331]: n is a, t, c or g
tgtgaaggtgtttgtcccaccacaaagccctcccacttttccctggagctctcaggcaggctgctgaaaagaacatctcatctctgctggaaagaaacacctcatctctggtggtggctcatgagcatctcctgataaaggaaaatcccaggcagagagaggggccaagttgtttatttccaaacacaagccagattccagctgtgacatgtatactggatctgctcactgcaaaggcgagctgggcgggagggccacggggagcgggggccaaagctgtgtggaggattgcgtggttgtttagtttcaagtaagccagtattcctaggancaagttcatagccccttctcagtcctgtttttcctgactctgcctgtctatggatttttcatgtcaacttgccccaagtgcaaagggtagttgccttgacccacttaacccaggggctcagagagacactccaccgggctcaaggctggggtctggtatccacctttccactccacaacatttattgaaagcttgctctggccaggtaccagtgtataagaatggctgtaacaaaaacccagccattatccagaacttgacctctgagaactcatggcctagaaaataaatacttgtgatgtcatgtgaaaagatgcaatggtaaatatg

SEQ ID NO: 5195 - DNA, 661 bp, Homo sapiens
  misc_feature [331]..[331]: Chromosome 17, SNP identification no. = rs2945377
  misc_feature [331]..[331]: allele = a, in linkage disequilibrium with rs2945379, respectively
  misc_feature [331]..[331]: n is a, t, c or g
cagctggaggcttccagatagtgaatgttgatgttattgaccaagttccttgtcttgcaagacatgaccagtttggaggggatattagataaaatagagttcaaataacagtaactcaagcaagttaatttttctcacacataaaagaagtctggatgtaggtaacccaatgtcggtgtggtgggtccacaaagtcattaggaactcaggaaccttccagctcacccttctgccattccttatccttatgttcctagatggctgctggaggtccagctttcacatcagctttccagggagcaggatgaatgaactggagaaggatgtgtcntgtatatattccttttgaaattaccatgtggcacttccatttatgtgtcattggccaggtattagtcacacagctacacctgcctgcaaggaaggatggaaacgggccagctaaaacctcagcattctgttaggaagaaaggagagtggaaagtgggaggccaccactagatgatgaaagatgagatagtgagtttgggtacctctggcccatgcaggctggccatccatttgggggttagattggggctggagcttatgagtggagtggggttcagagttttctaaattgggaggcataagcgtgtaggtgattgtgggagtcctggga

SEQ ID NO: 5196 - DNA, 661 bp, Homo sapiens
  misc_feature [331]..[331]: Chromosome 17, SNP identification no. = rs2945378
  misc_feature [331]..[331]: allele = a, in linkage disequilibrium with rs2945379, respectively
  misc_feature [331]..[331]: n is a, t, c or g
gactaagatcaatggaggagtaatattgaacagctgaggaaatgtgtcaagatctttgaacttgaagggaatgagagagagaagggggagctgaagagaaagtatttattaaggccagaaagatttgaatgcaggtttggaggctgaaggacagctagatctcccctccccatccccttcccaaggagggaggtattgatgggaggtgaggataggcaaatccagcaagtacaggccggtggcctccagtatctctgcaaaggggcttgtagagcatgaaactggtaagatgctgccccaggaattggggaagagcaaggaattagatagnatcaaatcaaagagctgctaagccagaggaagtaggtcaaaacctaaaactttggatgtccccaacccacctgcacattgagttttctccagtagcaattataggagcagagaaaaagagattacccaggattagaaggctgcaggcagagcggcaggaaaaggcagggagggggctctgggttcctggagtggcagtggtggtgtggagttcaagcagggttatattacattatgctgtaaggtggaaaacggtggggcacattttagaaatattcccattagaaatggtaagaaagaaaaaatcttatgcccatgaagttgtaaatgt

SEQ ID NO: 5197 - DNA, 661 bp, Homo sapiens
  misc_feature [331]..[331]: Chromosome 17, SNP identification no. = rs2948544
  misc_feature [331]..[331]: allele = c, in linkage disequilibrium with rs2945379, respectively
  misc_feature [331]..[331]: n is a, t, c or g
caacctgcttgactgtacacagccctgtccaagttcacacagtaagtaagaggcggagctggaatctgaacccaggccacctggctcccaggtctgctaccaagtaacaagcaggcacagtttcatattaaataagtggcctgcaaattaatgcaactcaaaatatacagaaggactgatgcgggtgactgagagcacaattctgtgtgtctagaatgatcacattttcagtaatgatgagacaatgctctgacatttacaacttcatgggcataagattttttctttcttaccatttctaatgggaatatttctaaaatgtgccccaccnttttccaccttacagcataatgtaatataaccctgcttgaactccacaccaccactgccactccaggaacccagagccccctccctgccttttcctgccgctctgcctgcagccttctaatcctgggtaatctctttttctctgctcctataattgctactggagaaaactcaatgtgcaggtgggttggggacatccaaagttttaggttttgacctacttcctctggcttagcagctctttgatttgattctatctaattccttgctcttccccaattcctggggcagcatcttaccagtttcatgctctacaagcccctttgcagag

SEQ ID NO: 5198 - DNA, 661 bp, Homo sapiens
  misc_feature [331]..[331]: Chromosome 17, SNP identification no. = rs2945379
  misc_feature [331]..[331]: allele = a, g
  misc_feature [331]..[331]: n is a, t, c or g
ttgtcgctctgttacaggttactgaccgcaagtccatgttccagacattctttgccaacacaattaattacaagagagccacccccaaagtcttagggtgaattgggaaagggccggttaaatgaggaagcaggccattccttggtaaaagtttgtagttttttttcccaatacatcttctctttattgagaacttcatttttatcctgtgttcctcctctgccatctcacactctcgctctgtctgctggattttggccacaatgcacctcattcatttgtatcagttgcaattgtaagatggacatttgttgatcatgttcagtcctcntgcatcttttttaaagcaccttcctgagagattttgctcatgtagtttttattggctgttattctgacagctgaacacgagggttcaggttgagaggtcctctcacgtgttggaaaacgtatgaactctttctcatcatcgcacagttctctatttgaaacagcaaatgattcttgggccgtggcgtggtatttgggctcctcctccggggggaggggtggaaggagtgctctgcaggaagtagagctgctccagcagcatgctggtgatctccttccctaggacttggttactcaggagggggctgacgctccctttcaccttctctct

SEQ ID NO: 5199 - DNA, 661 bp, Homo sapiens
  misc_feature [331]..[331]: Chromosome 17, SNP identification no. = rs7222355
  misc_feature [331]..[331]: allele = a, in linkage disequilibrium with rs2945379, respectively
  misc_feature [331]..[331]: n is a, t, c or g
ggggggaggggtggaaggagtgctctgcaggaagtagagctgctccagcagcatgctggtgatctccttccctaggacttggttactcaggagggggctgacgctccctttcaccttctctctcctttcatgggccataattgttttagtccaagccttgatgttctcccagcccttcttcagctgtttgaaatccggcagggacagctcggctgagagttgcattcgtgggtcagcgcctgcaggtacattgattgcttaagggcaatagttcacacatcacttttcttacattccagcacatatttgtacttttctactaaaatcagcngggtactcttttctagttctgagaagtatttggcaggttttataatttcattgttttgcattttccactatatttcccctggccgccagctatcctgtaatcccagctacttgggaagttgaggtaggaggactgcttaagcccaagaggtcaaggctacagtgagccatgtttgcaccactgcactccagcctggataacaaaaggagacactgcagtggcacacccgccccccccccccccttttttttcttttttgagacaaagtcttgctctgtcacctaggctagagtgcaatggcgtgatcttggctcactgcaacctccgcct

SEQ ID NO: 5200 - DNA, 661 bp, Homo sapiens
  misc_feature [331]..[331]: Chromosome 17, SNP identification no. = rs1010026
  misc_feature [331]..[331]: allele = c, in linkage disequilibrium with rs2945379, respectively
  misc_feature [331]..[331]: n is a, t, c or g
ctccccgtcacctgcaccttctgtaaccctgggcctgtgaggcagaagggggccgccctgcagtgccaaggccatgacccagcaggcaggactctgcacctttgtgcacagcctcctcgaggttcaacatcttgagctttcttcctgaaaaaggaagctgtttctcaacatattgctacacatggagactgagaaacacaaaccgagaggcgaatagggcactggccccaagggaggagaatgaagcggggaagggctggtatgggccagtctgcctgaggtaaccagccaaagggacaaggaaacgcccagcacaaacttgtccatcccnacattgtttacaagagggacacagtgcaaacaacccaaagccccaacaatggaagcacagctaaggaggtgatggtaaaaccacttactaaactatgacagagccactgagcaggtttacaaaaacataggaagttttttgtgttattttactaagcgacaggcaggacaaaaaaatctacatgatggatggcaagaactacgtaagcaaaacctcgcacacaaagtctttgcctggaaaacacaactgaaagaaaacacagcagaaatgtcatctgtgaatgggctgatctgagtgggaaggctataggtaattattttcttccttcta

SEQ ID NO: 5201 - DNA, 661 bp, Homo sapiens
  misc_feature [331]..[331]: Chromosome 17, SNP identification no. = rs2008013
  misc_feature [331]..[331]: allele = g, in linkage disequilibrium with rs2945379, respectively
  misc_feature [331]..[331]: n is a, t, c or g
acaaaggccactgtggcactcaaggctcaggtttggatggtggagtaacattgcctaggttcacctcccaccctggacagttactttatctctctttcatctccacttggggatagtaataacacccacctccccagatgaaatgagttagcattttatacacttctcaaaacagtccctgtttgttaaataaaaatagggaaccagcgttaccagctagaccactcgctcacagcaggttgaacccaggacttctgccatccagtatgggggaaagagtgctggacagaaccaggagaccgtcctggcactgccttctactttgtgtgantttgactaagtcgttgtccctctctgggcctcagtttcctcatcagtttttcatctatttctgtgagatgaccttaggcccttcttgtcttagaacatccaaggattttgtaatttaaaggcatttcagacatctgaagatgggtctggtcctgctaataatcctcactggttgacgtggtccttagatggggccaattgcaaaggtcagagggcaggagatgcagagccctgtggggtttgcccggtttttctcagtgcgggtgagctatcctccacctggagggttatggtagctgggtcacctgggaacaggccgtgggagaactgg

SEQ ID NO: 5202 - DNA, 661 bp, Homo sapiens
  misc_feature [331]..[331]: Chromosome 17, SNP identification no. = rs940011
  misc_feature [331]..[331]: allele = a, in linkage disequilibrium with rs2945379, respectively
  misc_feature [331]..[331]: n is a, t, c or g
gccccagggatgctctgccacctgatcagaaggaggccagaaccttccagaaagcctgttggaaaagcagcgcctgggagagagtccaccagctccaacctctttcctagcacagtcctctcctccacagctgcctgtaagccacatcctaccccgtcccacccgctgacaaagaaccagagcgagggcctcctgctagttctccagttgcaagggctctctgtgtttagctttctgatgtaacagctcgaagcggagatgcacgcactcactgttgcataagacccgatttcgctcacacaaacctcagggcaagtcagtctcaagtgcngcgggctggagcacagggtggcctcacagagcagcccgtacctgaaagtgctctgccgcgcaggacaacacattcccaaggaggccagttctcccacggcctgttcccaggtgacccagctaccataaccctccaggtggaggatagctcacccgcactgagaaaaaccgggcaaaccccacagggctctgcatctcctgccctctgacctttgcaattggccccatctaaggaccacgtcaaccagtgaggattattagcaggaccagacccatcttcagatgtctgaaatgcctttaaattacaaaatccttggatgttctaagacaa

SEQ ID NO: 5203 - DNA, 661 bp, Homo sapiens
  misc_feature [331]..[331]: Chromosome 17, SNP identification no. = rs940010
  misc_feature [331]..[331]: allele = a, in linkage disequilibrium with rs2945379, respectively
  misc_feature [331]..[331]: n is a, t, c or g
caacccaacgtcacccagctggtatgtgtcagagccaacttaaactcataagaggctgatgccccacgctgcccctccaggcttgaggcgctgggtctgaccttccacagtttgaaggctgacctttcccactgtgctccaccagcagtgatgcagatggagacatcactgacccagagcacacgaatactggtgaggagccccagggatgctctgccacctgatcagaaggaggccagaaccttccagaaagcctgttggaaaagcagcgcctgggagagagtccaccagctccaacctctttcctagcacagtcctctcctccacagcngcctgtaagccacatcctaccccgtcccacccgctgacaaagaaccagagcgagggcctcctgctagttctccagttgcaagggctctctgtgtttagctttctgatgtaacagctcgaagcggagatgcacgcactcactgttgcataagacccgatttcgctcacacaaacctcagggcaagtcagtctcaagtgctgcgggctggagcacagggtggcctcacagagcagcccgtacctgaaagtgctctgccgcgcaggacaacacattcccaaggaggccagttctcccacggcctgttcccaggtgacccagctaccataaccc

SEQ ID NO: 5204 - DNA, 661 bp, Homo sapiens
  misc_feature [331]..[331]: Chromosome 17, SNP identification no. = rs2948541
  misc_feature [331]..[331]: allele = g, in linkage disequilibrium with rs2945379, respectively
  misc_feature [331]..[331]: n is a, t, c or g
ctactcgggaggctgaggcaggagaattgcatgaacccgggaggcagaggttgcagtgagccaagattatgccactgcactccagcctggtgacagagtgatactccatcttaaaaaaaaaaaaaagaatggttgcatctgcatctgtactaagggggcttgagaatctgtggattttggtatcctcaggggttcctgggaccactcccccatggataccaagggacaactgaattaactcacttaatccttgcaacaaacctgtgagagacgccctatcacaactatccccattgtacagaggcgtaaactgaggatgaggaacagtccnatgtcatgcggctagtaagtggcagagcaagaaactgaacccaggaagttcagctgctcagcccatgctcttaaccatgggctacattacttccttaaatgactgagacttttggggtgcctactgtccatcaggccaatgctgggcatcttggtacaaatgttctcatttataaaaaaggactcagagggtcaggaagccaacccaacgtcacccagctggtatgtgtcagagccaacttaaactcataagaggctgatgccccacgctgcccctccaggcttgaggcgctgggtctgaccttccacagtttgaaggctgacctttccc

SEQ ID NO: 5205 - DNA, 661 bp, Homo sapiens
  misc_feature [331]..[331]: Chromosome 17, SNP identification no. = rs2948540
  misc_feature [331]..[331]: allele = a, in linkage disequilibrium with rs2945379, respectively
  misc_feature [331]..[331]: n is a, t, c or g
actctccagacctggatagtggtgacatggctgaaaaagacacacacacacgtgcgcacacgcacctgtcaccttggacaagctctagctgaacagggtggggatgcatctcaaaataaagagaggcggtatgctgccaagctctcaagaaatcaactgaccacccttattgaagaaattagacaatgacagctaactccaacaagggtgactattatgcgctagacactgctttaagtgctttatgcgtacagacagcccttaggatctgtgggttctgcatccatagattcaacggcagatcagaaatctttttaaaaaaatgaatggntgcggctgggtgcgggggctcacacctgtaatcccaacactttgggaggccgaggcgggcagaccacaaggtcaagagatcgagaccattctggccaacatggtgaaaccctgtctctactaaaaatacaacaattagctgggcatggtggtgtgcatctgtagtcccagctactcgggaggctgaggcaggagaattgcatgaacccgggaggcagaggttgcagtgagccaagattatgccactgcactccagcctggtgacagagtgatactccatcttaaaaaaaaaaaaaagaatggttgcatctgcatctgtactaagggggct

SEQ ID NO: 5206 - DNA, 661 bp, Homo sapiens
  misc_feature [331]..[331]: Chromosome 17, SNP identification no. = rs2948539
  misc_feature [331]..[331]: allele = g, in linkage disequilibrium with rs2945379, respectively
  misc_feature [331]..[331]: n is a, t, c or g
gtttaggtgacatcagctctgggagggagaaagaaggcaagaccaccttctctaacaagcaatggctaaagacaacgcagttatccccctaggccctgtgcacctcaggcaacacagctgtaactggactcacattactagcactatcattagcgggggatgagaaagggctcaggcaacaggatgccgctgctgtataatcccaggaatgccagccaggggcagtatagtgatggatagtcaggtgctggggcctagaggccaacagacccgggttcaaatcccagctcggccactgactagctgctttaactcagattacttaaccacnctctgcctcagtttccttatctgcaaaatgggggaagagggggatgtctattgctgaagacatcaggcctgctataatagattaacactcattgtcagccatctctatcatgaaaattccagtctcttgtactctttgaaagcagttagtctgacttgtttattgctttaagattcttaaacacattcctggatgactccatctacatggcatgtcccaagctaccctggtgtattccttgaaaatgggcaaacgtagacaaggccaggcgtggctggaacacactcacactgaaaggatggctttcctggcccttactttattctcagg

SEQ ID NO: 5207 - DNA, 661 bp, Homo sapiens
  misc_feature [331]..[331]: Chromosome 17, SNP identification no. = rs2948538
  misc_feature [331]..[331]: allele = g, in linkage disequilibrium with rs2945379, respectively
  misc_feature [331]..[331]: n is a, t, c or g
gatatgggatgtaggggacataaaaatcagacctgaaacccaggaataatattgcagcagggtttaggtgacatcagctctgggagggagaaagaaggcaagaccaccttctctaacaagcaatggctaaagacaacgcagttatccccctaggccctgtgcacctcaggcaacacagctgtaactggactcacattactagcactatcattagcgggggatgagaaagggctcaggcaacaggatgccgctgctgtataatcccaggaatgccagccaggggcagtatagtgatggatagtcaggtgctggggcctagaggccaacaganccgggttcaaatcccagctcggccactgactagctgctttaactcagattacttaaccaccctctgcctcagtttccttatctgcaaaatgggggaagagggggatgtctattgctgaagacatcaggcctgctataatagattaacactcattgtcagccatctctatcatgaaaattccagtctcttgtactctttgaaagcagttagtctgacttgtttattgctttaagattcttaaacacattcctggatgactccatctacatggcatgtcccaagctaccctggtgtattccttgaaaatgggcaaacgtagacaaggccagg

SEQ ID NO: 5208 - DNA, 661 bp, Homo sapiens
  misc_feature [331]..[331]: Chromosome 17, SNP identification no. = rs2948534
  misc_feature [331]..[331]: allele = a, in linkage disequilibrium with rs2945379, respectively
  misc_feature [331]..[331]: n is a, t, c or g
tcagaaagcaattatttgaaaagtcagtaaatgatctgtcttgatctgcctttcaagttttccttcctgcctcaattgatgtaaccccccaatatctcatgtgttgttagtaccagcagtccttaggggctgtggggaccaacaggactaaatcatgagaaagaaagacacccactttaccccctaactcccctgtgcctgaagcaattgaataacggcaacaaaggacttctgaccatcatccagtcattcaacaaccaaacctcttcccaatgcccggcaccgttggactccaaggacaacggtcgtaagcggcaggggtccataattntcaggaacccacacaagttgggggaacagatgtgtccgcacagacacctgaccgagggctaggaaaggcaaagcaacagacagcaggtctaagcgtccatgacacagcagccctgctgctcggtgcttctgctgggaggctgagggaagtgctggcccaggtgtcaggagccacaggtgtggtgttgctcacagaccagatacttcatcaacacggcctgtgtcccagttcaaacacacactccatgtgtttgtctgaaggtcaccaggcccacagggcacagccacgaactagtttaccccctcagctcaacccctcaatcacaacagg

SEQ ID NO: 5209 - DNA, 661 bp, Homo sapiens
  misc_feature [331]..[331]: Chromosome 17, SNP identification no. = rs2945384
  misc_feature [331]..[331]: allele = a, in linkage disequilibrium with rs2945379, respectively
  misc_feature [331]..[331]: n is a, t, c or g
agatgtaaggggagcttccccgaggcatggacagaatgggtcaatagtggaggaggagcagcagcttcagggaccactggaatgaaggctggagtaagttgccagggctttggtggcatcctgaagttcgggatggtatagtcagggacttggcaggagcaaagactgctgtgggcaccacgtaagagtctggtgctgcctactgaggagaaaggagtcagggtcttgtgggtgctggtgagctggaagctggtccacaactgcacctgccacaggaggactaaataaaacaagaggcaagtgatggacgaatggagtggctgtccagttncttcgtgtcactctgtaaagcatactaggatcttcttaaaagggatggcctcaggttataggcagcatgatggctagttttaatgaatttaatgctggcttagagccaggggtggggtacagcccagagggtaggttattgcaagtcaggaccagaggtggtggcccagttgggtggctggatacatttagagggtgtgggcaagcctgtggctcttattcacaggattcactgcctggaacagtctaggcgtggctggattttgggctttggatcgcaaaagaggtagaccctgcccactgccatcctgcttgtaccagtcaagacagc

SEQ ID NO: 5210 - DNA, 661 bp, Homo sapiens
  misc_feature [331]..[331]: Chromosome 17, SNP identification no. = rs2948532
  misc_feature [331]..[331]: allele = t, in linkage disequilibrium with rs2945379, respectively
  misc_feature [331]..[331]: n is a, t, c or g
ggacaccagtttcccatgtatagtagcaggctccctcagttacagaatcatgtcaatactcatttgtcaacctagtagtgttaacaatcttttccttatgtatggtaccatatcacttcctctacctggattgtcagtgaaaatttcagaggctaggaattagagtagatccctgatagcacaagggtgactgatgtcccaatcttcacacacaaacccaaagctggcaatgtccctaaagcacatcattccctccacaaaatacaatcatgtgtaactgaaaatactacagacccttccagacttctgatgggatgtactgtgtattcancattgagtaaagaaaaacaaagctacatcgggatgtgggtgctggacagcacactgggctcactcactggctcagggatgctcacctgcatgcctgccatcgagtccagcctcagccaaatgacaagtcactgctcatcctttgccgtcactcacaaatcatgaaacctctcatgtgaaacccacaagacttaaaggtgtacttcatcattcccatcttacaatgaagaaaccaaggcaccagcctttgtaactttcttgaatcctgtggttaaagaagggattccaacctcaatctaatgctctctatgcacctctcaaaataatgact

SEQ ID NO: 5211 - DNA, 661 bp, Homo sapiens
  misc_feature [331]..[331]: Chromosome 17, SNP identification no. = rs2948530
  misc_feature [331]..[331]: allele = c, in linkage disequilibrium with rs2945379, respectively
  misc_feature [331]..[331]: n is a, t, c or g
tgggttcctctgtggccacagaaccaaccatcccttggaggctgccacagtggagctggagcaatagctgccttgcctctaaaagcaagaccatttagcaccagctaaaatggcagtctagacagagagctcccacgggcggcttccacagggtgtgtggacagggacaggccagccattgtgctggactggctggaagtgcagcagtgacaggcagatgagccacgcctcctgtttaccaccagcacctgttctgactggtcagaggtcatgcctaccattagttagtggtcccatctcctctgcgagaagcttgggtttggcagccagnaggctctacccctcgcaccatcacacatcagctgtgtggcaggatctagatcatatcatcttagtctccttctctgtaaagcagagaaaatataatacatgccccatagcactgctgagaatttgctgcagactcatgtatgcaaagtgtttagtccaatgtccagaacatataaagtgctcactaaatagaactctgttagtgttactcctgctcagcctgcagaatgacctcgaaaaggaggagcatgaagacttttggcaggtgccgtttggattataccccacccaggcttttttgcacctttgcaaaaaacacctctttccagac

SEQ ID NO: 5212 - DNA, 661 bp, Homo sapiens
  misc_feature [331]..[331]: Chromosome 17, SNP identification no. = rs2945385
  misc_feature [331]..[331]: allele = c, in linkage disequilibrium with rs2945379, respectively
  misc_feature [331]..[331]: n is a, t, c or g
atcttgcggttttgtggttaagagaaaatgacgctaccaatgaaaggtccccttttaggcccccagggctgggctagcaggccccactgtggtttgtctgggaaagtagccccttggcgcttctgtgactgcaaccaactttccaagaagtgagagcagcttcatttcactctgacgggagtggctgcctgtaggccacctccatcctttgtcaaccagagaagttttgctccatcagcagaacccaaatctgtagaggttgtttcttaacaagttctgggagatagcagctgccaggacaccagacctgccagtagctgggtcgtgctgnactgcatgtcttcccttttccttgtctcaggcacagctagccaggtttatgggttatctgggtgcaaagaagaatcacttcaagttctgcacagttctacccatgggcctgctttgggctgtctagcggggatctctaccggcctttaaaaaaagaaaccgcttgctcctcttctagggaagctgtcctggcttttgagatgttcagacccctgtctcatcacttgcccagttggtgtttgtttttcgctgccatttgataaactttgtgtgcctgtctggcacaatgtattgtgtttgtgtgttcatcctttcaacaaaggttttaaaa

SEQ ID NO: 5213 - DNA, 661 bp, Homo sapiens
  KSR
  misc_feature [331]..[331]: Chromosome 17, SNP identification no. = rs2948527
  misc_feature [331]..[331]: allele = t, in linkage disequilibrium with rs2945379, respectively
  misc_feature [331]..[331]: n is a, t, c or g
ggtctctaactcctaggctcaagtgatcctcttgtgttagcttcccaaagtgctgggattaaaggcatgagccaccacacctggcctggtttgctattttaaaacctttgttgaaaggatgaacacacaaacacaatacattgtgccagacaggcacacaaagtttatcaaatggcagcgaaaaacaaacaccaactgggcaagtgatgagacaggggtctgaacatctcaaaagccaggacagcttccctagaagaggagcaagcggtttctttttttaaaggccggtagagatccccgctagacagcccaaagcaggcccatgggtagnactgtgcagaacttgaagtgattcttctttgcacccagataacccataaacctggctagctgtgcctgagacaaggaaaagggaagacatgcagtgcagcacgacccagctactggcaggtctggtgtcctggcagctgctatctcccagaacttgttaagaaacaacctctacagatttgggttctgctgatggagcaaaacttctctggttgacaaaggatggaggtggcctacaggcagccactcccgtcagagtgaaatgaagctgctctcacttcttggaaagttggttgcagtcacagaagcgccaaggggctactttcccaga

SEQ ID NO: 5214 - DNA, 661 bp, Homo sapiens
  KSR
  misc_feature [331]..[331]: Chromosome 17, SNP identification no. = rs869671
  misc_feature [331]..[331]: allele = a, in linkage disequilibrium with rs2945379, respectively
  misc_feature [331]..[331]: n is a, t, c or g
acccttgaaggccatgtgccagtgacagaagggctctagtgctgctgcttttagtgccagcagcctgacctctccagttaatgtggaaaagagtggttttgagtttgcacagctgtttgatttatagtcctgtctctggtcagccctttgaagtggtggtttcagagccgcgtggaatggagggaagggctggctgtgagaaacatggggataagaaccacacattttcttcctctggcactcctgagcatatgttttatgccaggtgctgtagtaggaactggggatatgagggaaatacggtccctgcactgatgtgtaattatagggngatctaacctagtcttttggaggtctccatgctgtagttgaatatgagctaggtgtcatcgttcctgtttacaggtgggtgaactgagactcagaaaaattaattatcttccttggggcagtgcagcctagtatatggtggatttgaacccagatgtgttcaactcagaagcctgggagctcgtgtctattgggggagactgaggcagaagctgttaactgtagtatgatagtaactccatgatcagggctctgaaagagtcacacacaacacaccaggaaggggagaggcggactctgacttggcctgggtaggaaactccagcaggta

SEQ ID NO: 5215 - DNA, 661 bp, Homo sapiens
  LOC147004
  misc_feature [331]..[331]: Chromosome 17, SNP identification no. = rs9903859
  misc_feature [331]..[331]: allele = g, in linkage disequilibrium with rs12453488, respectively
  misc_feature [331]..[331]: n is a, t, c or g
cctgtggaatggaattaattcaagggcaggttttttctacaaggtagatccatgctctcttttgaagaggcatgcccatggcatgaggctgtgaggatgagatacttggaggctcaggtagatttagaaatagaacagtgaaatttgagtttagtaatgaatacttactaggaataggataacaatcttctaaatctataaagtgcattttagcccataaaacccattcagactctcattttcccccacttctcccagcaagcaagtctgtgggtggactcagaagaggttaatgtcccatttgcagttgaagagactgaggcacagacanggaacacaatcgcctctgatgagccacgtggccttaggctagagtctgagaaagggtgactattggctactgtagtacacactcctatcacctgcagatggagcctgcagtgcccccaaagaggttaatttctcactagcagattctttctcagacatccagcaggtgacttgcattttaatggaccccagatgcttattgcttgcaaagaggtcaagtttctaaatgggcagccagatggagagcccttctggactttccctggtgtcaatcaaggctgcgcctgccattggcgcctgcttttcttgccctacaatggtgctagcacct

SEQ ID NO: 5216 - DNA, 661 bp, Homo sapiens
  LOC147004
  misc_feature [331]..[331]: Chromosome 17, SNP identification no. = rs8079016
  misc_feature [331]..[331]: allele = c, in linkage disequilibrium with rs12453488, respectively
  misc_feature [331]..[331]: n is a, t, c or g
ttcatgtgagaggtagtgtcagaagtaacagtgaaagcttgaaagtacagactgtaaatggctcaagttgcatctccctggagcccctatttcaacatagttttgaccagaatgttggtttcagctgcaagcaattgattggcctatacaattctgtcatcccaacaactgattaattcatcagtaatgaaactgtctgtggtccctgctagcatgcgagctaccattatcgagcatttattctttgtcaagttccccaagtactttacgtacattacctcgcttagtactctcaataaagtcttattacacaagccttgttattctgctntaagcatgaggagcctgggaggtcagttcagagaggttaaggaagctgcccagggcacagagctagtaaacggaaaagctgggatttgaaccccagtctgtttcagtctttcagccacatttttaaataggcttacaggggaataatttatatacagtaaagtttacattttttgagaagagagtacagtacattttgagaaagtatacagttgcataagcaccatacagtaaagctagagaacctttccctaacccaggaattcccttttggccctttgcagtcaatctgttcctttcaaccccaacccctgggagcctgcagtcaatg

SEQ ID NO: 5217 - DNA, 661 bp, Homo sapiens
  LOC147004
  misc_feature [331]..[331]: Chromosome 17, SNP identification no. = rs9898999
  misc_feature [331]..[331]: allele = c, in linkage disequilibrium with rs12453488, respectively
  misc_feature [331]..[331]: n is a, t, c or g
gcagaaggacccagcaaagaactttgattgttctgcatgaggcaggtagacgttgaatctgagtccttcgttttttcccctgcagttgagttctcttcctaggtgcaattcaagcatccagaaacagcagaaatgcttaggatcaataaattgggtggcagtgctgttaggcagtaaacttaggggagaattacacagggcagccatgaagacccaattctctaatgcctggggaaacactttgcaaattggtcggtgatgtttttaactgccttggatggtttcctatgagtgaaattgttctgtttggaaggtggctttagttggaganagtgttatttgattgtgttgaattcagtttgagtctacacaaatatgacacagagtctctgtcctgagtgggtttgaagtttaagtgggggaagggagagagatagtaatggagttagactattttagcatcactgcttatatgtgtgtgtgtgtgtgtgtgtgtgtttgcacgtgtgcacgtgtggtggatggggatcaattgaagggagtgaccatagaagggctattgtaaaataaatgaatctctactatgtcaataagataggcttaggggaaggggtatttcaagatgtgggaagagcacatgcaaggatccaaaagggcctgg

SEQ ID NO: 5218 - DNA, 661 bp, Homo sapiens
  LOC147004
  misc_feature [331]..[331]: Chromosome 17, SNP identification no. = rs12452350
  misc_feature [331]..[331]: allele = a, in linkage disequilibrium with rs12453488, respectively
  misc_feature [331]..[331]: n is a, t, c or g
ggcatgagccaccatgcctggctgacatggtccttattcttaaggcatggctttctgatgtcttaactggatctccaggtgttaacaaggcctctacactctgactgagcaagaactccagtatcttctagcactacttgacttctagtatttttgctccactctcaacctcataacagcccttcctggtaagcttttatgccttctccctgtgtctgtgctgtccatgactcctaccacaaagatatctggggcccccttcctcacagctccccactttatcatggcctaccccacagattccagtcacttcagtagtctcaaaatctgnttcctgcttctggtcagtgggaatgtcatgctctatatgggctctgcccctctacatcacagctagaatattgtccctaaatgaagaactgaaaaaaatgagatctcacttcataattttcttttttttcaaaggtcgtggtcttgccattgccattgccagaaagcagtttccttatatattctgcctagttttgtagtcacttatggcagagggctagcatagtgccagtgtctccattattgtcaaaagcagagatccccacattcatacctgctcttttcaatgtattttctactctgcagccagagtgatatttccatctgatca

SEQ ID NO: 5219 - DNA, 661 bp, Homo sapiens
  LOC147004
  misc_feature [331]..[331]: Chromosome 17, SNP identification no. = rs2043475
  misc_feature [331]..[331]: allele = c, in linkage disequilibrium with rs12453488, respectively
  misc_feature [331]..[331]: n is a, t, c or g
atcataaatgccaattttccttatctaaaatttcctgtcagatttatttaatcaactcataagtcctttggggcctcccttggttccaaagtagcagttgccttagtcatttcctctactgtctgggaaagaacttggtctccaaggtgatttcactttctctgatcagggaggacgtcaacatcacacaagtggtatgcttgctatcgatctgttttctcttcctttagggtttctgtgaaaaactggttgaggtgttatttttagcaaattgatgattgcctctgcctgcgcacatgtccatctgtctgtctgtgaacacagccaaccnaggtccaagaaagctttccttgccttgcctcgacagctgtattcatcttaagagcttcatgctgagcaaatggtttaaggcctttggtgattgaaaaaaaatggcagtacagtaacatgggcttcaattgtcacattttctgcacatgaggcctttgagtaatttgtagtcagcatcctgagttggaatttcaccaaatagttcactattctccatactattttatgctaccctgcctttgcttatgttgttctgtcagccaaaaatgttatttcttgttcattcacttactcaaaaatagttatatcatagacatagctatcataaggc

SEQ ID NO: 5220 - DNA, 661 bp, Homo sapiens
  LOC147004
  misc_feature [331]..[331]: Chromosome 17, SNP identification no. = rs12453488
  misc_feature [331]..[331]: allele = a, g
  misc_feature [331]..[331]: n is a, t, c or g
ccatccatacatgtatccataattcatccatgaacccttaattcatttttaaagcacatagttccttgctcaaaaaccctgactggctgtcatgtgtcgcatgttagaagcaaagttgcctgtcttagcattcccaattagcctatatttcctgatcatatctatatgaacccttccttagctcactttcccctggggcaagctggatttttttctcctctccttttctcccgccctctttctcctttcctctgtgccctccccatcactcctctccacctcttgtttgttgcagtccaactcttcattcacttaagtcttcacttcctcntgtgactgtcccctttgctcttgcactagctgtctcctgggtgatctaccccttctctgaactactaaagctgtcagcatctgactcaccctttgggtttttgacttttgtgtccttaaatttatctttttataaatgtggtctttctcctccaagaatcctgcctttcttcagtcctagtaaagactattgcctttgactctatcccatctagccttgagcccatcaggactctgagaaatcaggaatgagtcttgatacttcaagctttgtgcttctggctcctggcctgagtcctgggcacctgtgaggctctgctctgaagccttt

SEQ ID NO: 5221 - DNA, 661 bp, Homo sapiens
  misc_feature [331]..[331]: Chromosome 17, SNP identification no. = rs12451111
  misc_feature [331]..[331]: allele = c, in linkage disequilibrium with rs12453488, respectively
  misc_feature [331]..[331]: n is a, t, c or g
gtcacccagcctggagagcagtgtcatgatcttggctcactgcaacttctggctcccaggttcaagcgattctcctgcctcagcctcctgagtagctgggactacaggtgcataccaccacgccccgctaatttttgtatttttaacagagacagggttttgccacgttggccaggctggtctcgaactcctgacctccggtgatccacccgcctcggcctcccaaagtgctagaattactgacatgagccaacacacgcagcctgcctgctttaaatctttatctaagcaaaagtactatcttcagaatccactgtaactttttctgccntcaacatcaagtttctggtattcagccacgttgatacaggctgcttactcatttgaccatctccttctcttttggtggactgttagggtgtttctaatctctcactaccagagtgccgctcacttctcctgcacagggaggaggagctctctaaggtggttctgttcgtttaggtgtatctttgacttaactaaataataccgaactgctcttcaaagtgtttgtatctgcattagcataagagttaccattgctctaccatcaattagtacttggcactctcagattttttcattcctgttccttggatggtgggaaaatggcctttgc

SEQ ID NO: 5222 - DNA, 661 bp, Homo sapiens
  misc_feature [331]..[331]: Chromosome 17, SNP identification no. = rs12451588
  misc_feature [331]..[331]: allele = c, in linkage disequilibrium with rs12453488, respectively
  misc_feature [331]..[331]: n is a, t, c or g
tgacctccggtgatccacccgcctcggcctcccaaagtgctagaattactgacatgagccaacacacgcagcctgcctgctttaaatctttatctaagcaaaagtactatcttcagaatccactgtaactttttctgccctcaacatcaagtttctggtattcagccacgttgatacaggctgcttactcatttgaccatctccttctcttttggtggactgttagggtgtttctaatctctcactaccagagtgccgctcacttctcctgcacagggaggaggagctctctaaggtggttctgttcgtttaggtgtatctttgacttaantaaataataccgaactgctcttcaaagtgtttgtatctgcattagcataagagttaccattgctctaccatcaattagtacttggcactctcagattttttcattcctgttccttggatggtgggaaaatggcctttgctcttgctttaatttgcattcccctgatgatccaccaggcagggtgtatttcatgcctattgaccatttctgcttccacttctttatcttacctgtccatagccttgtccattttactattgagttgttgatctttttcttattgatttatagcagggtttcttagcagtagcactatcaacattttagact

SEQ ID NO: 5223 - DNA, 661 bp, Homo sapiens
  misc_feature [331]..[331]: Chromosome 17, SNP identification no. = rs12452510
  misc_feature [331]..[331]: allele = t, in linkage disequilibrium with rs12453488, respectively
  misc_feature [331]..[331]: n is a, t, c or g
ataccagtacctacctcacagggcacctgtgaaggccaagtgagcacttaataagaactcattgcaatccagtgctcttggtacaggcagtgatagcatgcaagaaggagatgttttctccttactccctacccataaatgctatacctggagtatggtgagaaagcaaagggcacctggttctttgagtctcacagacctgaaccaggatcataccgattccaccattgtgatcctggggaaaggtatagaacatctctgggcttcacttttcttctctataaaatgggagtatcaacagcacctacctcatagagttgttgtaagggtnatatgcattaatatgtgtaatgcgctcaaaatagggcctgacatatagtatgttctcattaaacattaccttgtaacaaatgtatgacctctttgttgactttgagcctcttcattcatcttttctcctctgcttttccttcttataccttcctctggccagaatacccaactgctagggcttgagaagacaatgttgaagacagttagccctctctccattgccactgagtgctgtgtgatttatacacagtatcccagggaagcctcctattactgctgcaagggagggtcattttaagaggagtccaaggcttctggaacatgttat

SEQ ID NO: 5224 - DNA, 661 bp, Homo sapiens
  misc_feature [331]..[331]: Chromosome 17, SNP identification no. = rs12449501
  misc_feature [331]..[331]: allele = g, in linkage disequilibrium with rs12453488, respectively
  misc_feature [331]..[331]: n is a, t, c or g
taataagaactcattgcaatccagtgctcttggtacaggcagtgatagcatgcaagaaggagatgttttctccttactccctacccataaatgctatacctggagtatggtgagaaagcaaagggcacctggttctttgagtctcacagacctgaaccaggatcataccgattccaccattgtgatcctggggaaaggtatagaacatctctgggcttcacttttcttctctataaaatgggagtatcaacagcacctacctcatagagttgttgtaagggttatatgcattaatatgtgtaatgcgctcaaaatagggcctgacatatantatgttctcattaaacattaccttgtaacaaatgtatgacctctttgttgactttgagcctcttcattcatcttttctcctctgcttttccttcttataccttcctctggccagaatacccaactgctagggcttgagaagacaatgttgaagacagttagccctctctccattgccactgagtgctgtgtgatttatacacagtatcccagggaagcctcctattactgctgcaagggagggtcattttaagaggagtccaaggcttctggaacatgttatgctccctctgtggccccaggtctaagtgcagcccttaaattactgtgc

SEQ ID NO: 5225 - DNA, 661 bp, Homo sapiens
  misc_feature [331]..[331]: Chromosome 17, SNP identification no. = rs12452091
  misc_feature [331]..[331]: allele = c, in linkage disequilibrium with rs12453488, respectively
  misc_feature [331]..[331]: n is a, t, c or g
ctaccacaccgtgaaaaacaccccttggatttcggcgtctggctcgggtgggctgcatttattcccttatttggccccacccacatcctgcttattggtccattttacagagagctgattggtccattttacagagagctgattggtccatttttcagaatgctgattggtccgtttttacagagtgctgattggtatgtttacaaacctctagctagacacagagtgctgattggtgcatttccaatcctttagctagacagaaaagttccccaagtccccacctgacccagaaggccagctggcttcacgtcttattaacatcctgaantccagggttggtacccacagggtagtaagttgaccaccagaccactttatacagcatccaaactggcatggagaactcagactccattcagatggatatcaattccatctggatctaattaaatgcaaaggacccagcatcacaaatacaggtggcaggtaagactcaaagtcaggagtgcagcactgctgcaactctgggtatagagttctatgagagcagggctttgaccattgtggtgggagagatgtatgcaaagagggagcggaaggaaagagctggggactagagatctgagtagaaaccgcactacaggtggcatcagtatca

SEQ ID NO: 5226 - DNA, 661 bp, Homo sapiens
  misc_feature [331]..[331]: Chromosome 17, SNP identification no. = rs8072065
  misc_feature [331]..[331]: allele = a, in linkage disequilibrium with rs12453488, respectively
  misc_feature [331]..[331]: n is a, t, c or g
ttagttcatggagagggtgacatgtgttgtcaatgattacagttagtatggagcagagctggggctggaagctggttcttagagtctgagtctagttctcttgtggggtggctaacaagagaatgaatggctcttgttgaaattattccagtttaccccaggactgagttgatttttaggatctgaggcttttaattttaaaactgggtaagttctgggcaaattgggaggagcttgtcactctacttcagaatcccagggtgtctgttgtgatagagccctgtcacctccatcaggttcaggggagggaggtggcatgtgacttggcacnggtgaggcagatgttgtacctggagcagccaaccagggctgctagctgagaacagccagaagaaccttatggatgatcagagagtggcaggagatccatctaagtcagatcttggggtggggtttgatgggttgtggagggacaggaggtactggtgatggagtgacccctcctgcctaggctgcttgtggagacagttcgtaggagaaggattcggaagcctgagagtgctgagccggagaggggacactaacaggaactgcctggcaagaaagacccatgagagagacaccgatggcctaaagacaaagacagggcagaggcaccatg

SEQ ID NO: 5227 - DNA, 661 bp, Homo sapiens
  misc_feature [331]..[331]: Chromosome 17, SNP identification no. = rs9900677
  misc_feature [331]..[331]: allele = a, in linkage disequilibrium with rs12453488, respectively
  misc_feature [331]..[331]: n is a, t, c or g
tgtcttctgttcaactcagggagtagaaggtctttgaccctattgcttggccttccatctcctgagagactcttcagaatccatctcttctttccattctgctgtgctctggtgttctcattatctgtagcagaagttttataatttgcagcttacagacccctagagattcacgggagagtttcagagagttcataatcccctttccccaaattgaagtgtatgtctatttttacctgcaaagtagttcacacatttcacaagatccccaaaagcatctgcaaaccacaaaagtcaagaatcactgcttaggttttgtggccaggatatncaaaggacctgagatgaggacggagaaaggtttttgataatatcaaaacatccactgcagatgcagcaattgtatgtgcaggcacagctgtgatgtccatggaacatctggctgataaatgaattttcctctttccagtggttttgaatcatgcagtgacagatttttagagcgagatgcctgttcactgctgggcacttgattgtctctctgggtcccctcattggtaaaaaaaaaagcacattgtggctaggttatcttcaagggctcgcccatcactgatgttttgtgcttttgtaaagagcctcagaaatcatctctttcaggatc

SEQ ID NO: 5228 - DNA, 661 bp, Homo sapiens
  misc_feature [331]..[331]: Chromosome 17, SNP identification no. = rs1351554
  misc_feature [331]..[331]: allele = t, in linkage disequilibrium with rs9303681, respectively
  misc_feature [331]..[331]: n is a, t, c or g
tgggaggtaactgaatcaagggggcaagtctttcctgtgctattctcgtgatactgaataagtctcaggagatctgatggttttaaagagaggagttcctctacacaagttctgtctctttgcctgctgctgtttacataagacatgacttgctcctccttgtcttccaccatgattgcgaggcctccccagccatgtggaactgtaagtccgttaaacctctttctttcgtaaattgcccagtctcgggtatgtttttatcggtagcatgagattggttttttttttatctcaccaccccccaccaaaagtgaaacaactattatcactncattttagatgtctaatgacttgtccaaggtcactcagtaagttaatcactaagactagatgtaacttgatttcctagtccaatatattttctatatttaataataaaatgtgcaaaacatgacaggatccccaaaatagcaagaattaagatgagggaagtttgctgtcaaggttaaagcagtccagtgcttttcacaatcccttgctaggctgggaagtcctctttgttgcagggtgttatcctcagattttctccacacactcccacaatactctgccttaccctatttcgccagcaataaagtgtgtactccttagtggtctctga

SEQ ID NO: 5229 - DNA, 661 bp, Homo sapiens
  LIG3
  misc_feature [331]..[331]: Chromosome 17, SNP identification no. = rs3135966
  misc_feature [331]..[331]: allele = a, in linkage disequilibrium with rs9303681, respectively
  misc_feature [331]..[331]: n is a, t, c or g
ttttatactcttttgggatcctacagatctgtcttctaaggcagcaggtacaccaaagaagaaagctgttgtccaggctaagttgacaaccactggccaggtgacttctccagtgaaaggcgcctcatttgtcaccagtaccaatccccggaaattttctggcttttcaggtaagataggttagggctactttagctgttatagtgctgcttttattttgtattctacctaggattctggctaaagagtgaaaattctgtgctatctcatctcattaataatttgcttctgtctgagcagagactggtaatggctaattctaagccttccncttggtttttgtttgtttgtttgttttttggttttgggggtttttttgagatgaaatcttgctctgtcatccaagctggagtgcagtggtgcattctcagctcactgcaacctccgcctcctgggttcaagcgattctcccacctcagcctcccaagtagctgggattacaggcacctgccaccatgcctgactaatttttgtatttttagtagagatggggtttcgccacgttggccaggctggtctcaaactcctgacctcaggtgatccacctgccccagcttcccaaagtgctgggattgcaggcgtgagccactgcgctcggcca

SEQ ID NO: 5230 - DNA, 661 bp, Homo sapiens
  LIG3
  misc_feature [331]..[331]: Chromosome 17, SNP identification no. = rs3135974
  misc_feature [331]..[331]: allele = a, in linkage disequilibrium with rs9303681, respectively
  misc_feature [331]..[331]: n is a, t, c or g
ggcaggagaatggcatgaaccctgggggcagagcctgcagtgagccaagatcgcgccactgcactccagcctgggcgacagcgagactctgtctcaaaaaaaaaaaaaaaaaaaaaaaaaattctgaggttggttggtttgttgtttgctggtaggccaaagatagagaagagtccaggtgatgataaggacagcatgtttctggaagggctccggtgttggggatggaatttgggaggagttgagagaaagagagtgttttagttcttgcaacctggttgaacattgacactttggagattttgtcccctaaaatcatatttagattccngatcagagatgaggatggatttataatttacaaagcccagacaagaaacagtgtacaacagcagttagcttagtaatggctctgccacaagtttgccgaataaaatttgctttttaaatggtcacaaggaggtgaaagggaatcaccgatgagttgcacataattatttttaagtgtctggaggaaatccctgccccttgaccaccttttgtaaaaatgtattattttttttttataactgctccttggggagcagggttttattttgacaataagaaaagaaaagttgaagcagcgaggggtagggatgttgagtgtactaatggaatc

SEQ ID NO: 5231 - DNA, 661 bp, Homo sapiens
  LIG3
  misc_feature [331]..[331]: Chromosome 17, SNP identification no. = rs3135983
  misc_feature [331]..[331]: allele = t, in linkage disequilibrium with rs9303681, respectively
  misc_feature [331]..[331]: n is a, t, c or g
atggtttccacggtgatgtgtacctaacagtgaagctgctgctgccaggagtcattaagactgtttacaacttgaacgataagcagattgtgaagcttttcagtcgcatttttaactgcaacccagatgatatggcacgggacctagagcaggtcagaggaacgggagggagggtaggctacattccaggtggggttttgccaagccaggcacctgcagcctctttttttttttctggttgggacacatactgttttaggaaactgaaacccatttgagcaagcttccgttatagggggagctgaatgtgaggctatagctcttaatttcntaagtttctgagggtggaaaccatacaactgctgaaccacaaaggcctggttctcaaaaggcagaatttgagacttgccccctctgtctctcctggggcttttattctggactctttttttcttgcttgttttctcctataacttggctttaccaagctttggtttgtccgtgactctatccctggtaccatggcaagtttccatccccttctaggaattgtggatgggctagtgtctctaagaagtgggctagatatgttgagttgggataggagctatgattgaaatttcttgattcatcttcagtcctgggtcttgggggatacact

SEQ ID NO: 5232 - DNA, 661 bp, Homo sapiens
  LIG3
  misc_feature [331]..[331]: Chromosome 17, SNP identification no. = rs2074516
  misc_feature [331]..[331]: allele = g, in linkage disequilibrium with rs9303681, respectively
  misc_feature [331]..[331]: n is a, t, c or g
aggaagattgacatcatgccgcctgggaggggagtgtgagatgagtgtgggttggaggagccatctctgccagtcccaagagcccagggccagggagaggaccttgggtcctggccgtcagagtgccagagtttacctcttggagctacctcttactaactgtgtaattttaacctttataagccccaatttcctcttctgtaaatgagggataatcacacccaacctgttgggctctggggcattgaactgtgttggacacatgatagattgcttaaaagtattagttcctcagactccagcttcctttccagtcaggaaagagattttncctgaggagaaagctgtcaggccctgacgaaataattggtggtaagcgtccttctgctaggctagcatagggtactctattctgacttctccctaaccgagtaagcagctctgcctgaggtgactcaggccagcttggggccctagatcctaggacttcggaagtcataactggccatgctggcagatcaagccagtaacaaggccagcctgtacctcaagcggtaccttctaaaacagtaccaccccagggggcagaggccaccctgacctttgctcccttgcccatagaaggctccaaggaccaccaggtcagctgtgtcggccatgg

SEQ ID NO: 5233 - DNA, 661 bp, Homo sapiens
  LIG3
  misc_feature [331]..[331]: Chromosome 17, SNP identification no. = rs2066505
  misc_feature [331]..[331]: allele = a, in linkage disequilibrium with rs9303681, respectively
  misc_feature [331]..[331]: n is a, t, c or g
catggtgaagatcagcaaggtgaggaagggacctggttggccatggcctctggactggccgccatcactgagacagaggctgtgctttggggactacaggtatttctgtctccccagaaagaagggttgcagcttgctcaggggagcaggattaggccttataatctctgaatgccttcttgtggaaaatggcttgcatgcctctaggtcatacccactctgggctgggaggatcacatggctcaaacatcagctgtttaagtggcttcttataatctcattaccaagagaagggatttaagccttgttccaggttgggaacagcccaaantagcatcttttctcctctaggaccccagcaaaatacccagctggttgaaggtcaacaagatctactatcctgacttcatcgtcccagacccaaaggtatcaacccagtggcttgggggcctccagctcatagaattagcttgcaggttctctagtgccatagagaatccatctcacctcgctgaaagtccacccagggataggggtctggatttccagctgagtgataggcacagggacaaccagacaactctgaggaattttgaatagaattctttctgcaatacaattgctttaaaaaaagagagagaagaagagagtacctatcccc

SEQ ID NO: 5234 - DNA, 661 bp, Homo sapiens
  misc_feature [331]..[331]: Chromosome 17, SNP identification no. = rs1859248
  misc_feature [331]..[331]: allele = a, in linkage disequilibrium with rs9303681, respectively
  misc_feature [331]..[331]: n is a, t, c or g
tggagtgcagtggtacagtcttggcttactgcaacctccacctcccaggttcaagctattctcctgccttagcctccagagtagctgggattataggcgcccaccaccacaccaggctaatttttgtatttttagtagagacggggttttaccatgttcaccaggctggtcttgaactcttgaccttatgatccgcccgcctcagcttcccaaagtgctgggattacaggcgtgagccaccacacccagcaggagaaaccattttctaggctctttaggaaggaccatgcaatgagtaggtgatgtatttgagccctcacagtctttacanccctagaggagctggaggacttaagagtttgctgcagaagcgtggccaagcacaaaacacatgatcaggaaagcagagtgttttcccattaccaatggatgaactatgcaaaccctaaacgccttggcagacacctcccaccccttacccctcccatgcagctgaaaaatctgagactagaaccaatcatgactctggatggcagagggaaacctctaaagggacttattacattggtacagacatatttatgctttcttccatcaccaaccactaaacccctttggaggaatgaaataactgcataaactagtcaactgaacactgggc

SEQ ID NO: 5235 - DNA, 661 bp, Homo sapiens
  LOC117584
  misc_feature [331]..[331]: Chromosome 17, SNP identification no. = rs16970540
  misc_feature [331]..[331]: allele = t, in linkage disequilibrium with rs9303681, respectively
  misc_feature [331]..[331]: n is a, t, c or g
agccaagccaaaattaaggagaaggccactgcctccacccattgcttcccctttccgcataaactaaggatggtgcaaatcaggtcccaagagaagcagcagcagggattatgcacgcactatcccttgcagacagaaacaaatttcccagcagtttgggagcctgatgttttgttggctcccagagtcaggtcaggagaccaacagcttccaatcccagcatttaatgaagtggcttttaacaactttgaaatttttctatagcatttgtatttcatttctcaccaaagataagtttactggtctaaaatctgtcctaaggaccactatnggtctggtaaactaacatttttggtccaaagaaacaaatggatttaggcaatgtagcaagagactttagcaaagatagttaaagcacagaaagccggagagaccagaaatttaaatccgaatgtgctggggaggaggacttctgattgatgaaacacatgggcaagcatctcccatatggggtggggatgggttgggtacaggaggaggggtgaaactgtctaggttcagggaggaagacaggacccaagttctggaaagttctctgttcatcagttaccatcatcactccaagatcactgaaccaagaacatacccatgtgatttatac

SEQ ID NO: 5236 - DNA, 661 bp, Homo sapiens
  LOC117584
  misc_feature [331]..[331]: Chromosome 17, SNP identification no. = rs2074520
  misc_feature [331]..[331]: allele = c, in linkage disequilibrium with rs9303681, respectively
  misc_feature [331]..[331]: n is a, t, c or g
ttcatcacagttccatttctatctaaacttttctgaaccagttttatctttttagcctgttctgcctcaggggataatgagtccctacgtgccactcacacactcactatattacagccccaacagtctgaaaattatttcttttaagctttgagaactttgccttagttctcatgttctgggatgtgtctgatccacaagtgctgtgtacttttcaaatctttacctgttggaggggatgaagtgtggattaaacaagtaaccagagttggttattgaggaaatgtttcctcggaggagctctatttgagggaagcatgtgcactgagantttgtttacaatgtacctgttatctcccacctccctcccccagtcacccctatacacttaagacattctcctcactcctctgcccctttttttctgccctgtgtgtttgtacagggggagcagtaccatcaggcttggaggagaacctgtgtaagatctgcatggactcacccattgactgtgttcttctggagtgtggccacatggtaacctgtaccaagtgtggcaagcgcatgaatgaatgtcccatctgccggcagtatgtaatccgagctgtgcatgtcttccggtcctgagagcttgcatcggtttcttcagtgccttacaggg

SEQ ID NO: 5237 - DNA, 661 bp, Homo sapiens
  LOC117584
  misc_feature [331]..[331]: Chromosome 17, SNP identification no. = rs6505438
  misc_feature [331]..[331]: allele = a, in linkage disequilibrium with rs9303681, respectively
  misc_feature [331]..[331]: n is a, t, c or g
ccaaggggatcaagaagtcagtgacaaaagtggatgtggaaattggatcttgtagttcctaattcccccatattgcccaagccctatagatcaagggtccccaacccctgggccacagactggtactggtccatggcttgttgggaacccggatgcacagcaggaggtgagtggctggcaagtaagcattactgcctgagctttgcctcctgtcagatcagcggtggcattagattctcataggaatgtgaactctgttgtgaactgcgcatgcgagggatctaggatgcatgctccttatgaaaatctaactaatgcctgatgatctggntagaatagtttcatcccaaaaccaacgcaccccagtctgtggaaaaattgtcttccacaaaacgagtccttggtgccaaaaaggttaggggccgctgctataaataacagagtcacttaaggcacttatgcaacatcatcacttcttatacaacaattatgtccactggcctcactctaatccagtagttagttggtctacctgtctaccttccctcttctgggggctttttgaggacagagacagtttattactcatttctatactccccagacctgggtcatgattcagttgatgtgctgctcttagcttaccacttccaagcccccc

SEQ ID NO: 5238 - DNA, 661 bp, Homo sapiens
  LOC117584
  misc_feature [331]..[331]: Chromosome 17, SNP identification no. = rs2240074
  misc_feature [331]..[331]: allele = t, in linkage disequilibrium with rs9303681, respectively
  misc_feature [331]..[331]: n is a, t, c or g
gtgaatacccgctctcctgtttattgcctgaccttgaatacaacagttgatctccctaagcctcggttgctttgtctgtgaatcagggaagaacactaatacctactttgcaatgtcgctttgagaattaaatgacaagctagcatatagaagcacctcaataaattaatattaattgtaacaaccaccaccaccataaccttcatgcagaaataattacagtttaggatttgaatcctggctgtcaccgttaggtaatatttcctagctataataaaacagcttacacttgttgaggactcattttgtgttagatatgctaaatgggttntctcttaatcttcacaacaaccccatgaggtagatactgttatcacccccattttacagatgtggaaactgagcaccagagaggctaaattacacacccaaggtgatactgcaagaaataagggagggaggcttaataaaaatgcagagctttttgattcttatgctggtagtcttaattaatacctcaggtgcttcaggagtaaataaagtaagcctcaaattaaataataaatgtgaagtgtcctgtacatggatatacacaatacatagtggaggtcttccacccgagtggcttttaatctaaaatctgaaagtggcttgcaccctt

SEQ ID NO: 5239 - DNA, 661 bp, Homo sapiens
  LOC117584
  misc_feature [331]..[331]: Chromosome 17, SNP identification no. = rs9303681
  misc_feature [331]..[331]: allele = c, t
  misc_feature [331]..[331]: n is a, t, c or g
ctgttctttatacatggtcttttattaagatgttaatgtaatcaccagtcaattcctatgctgctcatctgattcatgggggaactcaagccacaaaaggatggagaaaatctgaccagcagcatgtggcacacccacatagtgactgctaatgaggagagaatgaggcaaaatctgggtaaaaaaaagggggtggtaaagagaagttcagtgagtcagtgcaagggaaaacacaggttaatagaaaagaaagaaaaggaaatgtgaaaggaagaagaaaagcaaaaaagggagggaatctataataaacaatgagtagaaacttaaaaanctgaaattctgttcagttattcattcattcatccaatagatattgaatgcccactatgtgcagggaactgaactagatactaggagaaagacaaaggtcaaccagacagatctgctcagtgaggccatggtctagtaggagataggtaggtacacaaacaactataatagatggcagaaagtgtaatgtgccacaaaggagacataaaagagaattctctgctatgagactcaggaagaagtgattactcccagtgagggatcagactagggagccttcatgggaagaatgacattccaagccaaaagcacaacagaaacaagggtactc

SEQ ID NO: 5240 - DNA, 661 bp, Homo sapiens
  LOC117584
  misc_feature [331]..[331]: Chromosome 17, SNP identification no. = rs8065886
  misc_feature [331]..[331]: allele = c, in linkage disequilibrium with rs9303681, respectively
  misc_feature [331]..[331]: n is a, t, c or g
gcaataaaatggttgtcatgttatgccaccaaaagtcttcgggtaatttgtcacacaatagacaactgaaacagtcagaaattcaacactctcttgggcagtcattcaaacatttccccactttgatgatcaaaaaattctttctcgtattcatcaaaattgctcctccttcaatttaagaccatttcctcttaaatctttgaagttcatgaagaataattaataaaaatccccctggcaaaactattcttgtatttgaagatgataatgaagttatctcttagcttttctttctctaggctaaaatctttcccccctttttaaaacttanaatgataagacctgtttttcaaccttttaatcattttaattatcctctcaagtatgagagacccaaaattgaacaccatatgccaatatctaacagagattatttcctagctctaatggttcagctttttataatggaatttctcatagtcccaaatatggcattttagcactccaaaagttgtgaagtgatctaaaaagttaattacttactataactgtaaaaggttttctgcccttaacactcagcttactccattttgggatgaccgctttcactcaccagcctggtttgatactccaccagggcagcaggttttcacaacttcca

SEQ ID NO: 5241 - DNA, 661 bp, Homo sapiens
  LOC117584
  misc_feature [331]..[331]: Chromosome 17, SNP identification no. = rs12453568
  misc_feature [331]..[331]: allele = c, in linkage disequilibrium with rs9303681, respectively
  misc_feature [331]..[331]: n is a, t, c or g
gcgatgaaaagcaggagggagatagagtagtagcctagtagaattagagatgagggaggttcttcctattaattcagaaaggaatatgggaacaaactcactgataagacagtgttctccacaactcaatatttagttattaggaaggcaaccaaatgccttcacttcttttcctttaacaatggcttagtttgactaaagtgtttctcacaagatacacacaaaaaaacaaaatacaagagcaaatgacggataaagctgtaaacctaacgttttacttttctaagatttatataatcagtgatttaattggacctaactccacatccanaactcaaatgaaagaaaacttctggccgggggccgtggctcatgcctataattccagcactttgggaggctgaggagggtggatcacctgagcttgggagttcgaaaccagactgaccaacacagcaaaaccctgtctctactaaaaatacaaaattagccgggcatggtggcgcacatctataatcccagctacttgggaggctgaggcaggagaatcacttgaacccgggaggtgaaggttgcagtgagccgagatcacaccattgcactccagcttgggcaacaagagtgaaactccgtctcaaaaaaaaaaaaaaaaaaaaaaaaa

SEQ ID NO: 5242 - DNA, 661 bp, Homo sapiens
  LOC117584
  misc_feature [331]..[331]: Chromosome 17, SNP identification no. = rs3937429
  misc_feature [331]..[331]: allele = c, in linkage disequilibrium with rs9303681, respectively
  misc_feature [331]..[331]: n is a, t, c or g
tgtatgccaccatgcctggctaattttaaaataatgtattgaaagaacttagtcagaaagccacagttattatttctcccatagcctcatattctcataattttcatgtaacctcataaatcctcaagtgcctgaaaccactagttcaaacgagtacctttttaagctctaaaatgtaatcctcaacctttccactttaaaaggaagaactaggatggagtgtggctataatttggggcagttggttaaaactgtatcagagtcccaaagaggggaatgataagctgcagcagctctgttcacttgctcaatggtgtttctcttagtcaanttaggagttccatgcctttggccttcaggctgctctttatatagttcgtatctgtctcctgggcatagtactgtctggattttctctttctttttttttttttttttttgagacgaagttttgctctgttgttgcccaggctggagtgcaatggcacaatcttggctgactgcaacctctgcctcccgggttcaagcgattctcctgcctcagcctcccgagtagctgggattacaggcatgtgccaccacacctggctaattttgtatttttagtagagatgggggtttctccatgttggttaggctagtcttgaactcccgacctcag

SEQ ID NO: 5243 - DNA, 661 bp, Homo sapiens
  LOC117584
  misc_feature [331]..[331]: Chromosome 17, SNP identification no. = rs10083888
  misc_feature [331]..[331]: allele = t, in linkage disequilibrium with rs9303681, respectively
  misc_feature [331]..[331]: n is a, t, c or g
taatctatcaagtttgacatttcatccaactaagcaattaaaccaggatgaaaagcatgcatggagagatttccctgcctgctccaaatcaacactaattttgacattataaccacaaaaactaataatgcatcctcgtagactattcacaaaaggcttctaaaaagcaaacacaaaagcgtctcgaagaaattgcacacccctaaattttattttctgtctcccatctttaagcatcttaactgtgagttaagttacaggccaagaagttagaaactcctttccagtatttagtcaaaaagaggggaatatgcctcccaatacaagcacncaatgcaaattctatcaatttattctttttttttttttttttttttttttgagacggagtcttgctctgtctcccaggctggagggcagtggcatgatcttggctcactgcaatctccacctcccatgttcaagggattctcctgcctcagcctctcgaatagctgggactacaggcgcgtgccaccacacctggctaatttttgtatttttagtagagatggagtttcaccatattggccaggctggtctcgaattcctgacctcaagtgatccgcccgcctcaggcctccaaaagtgttgagattacaggcatgagccaccatgcccg

SEQ ID NO: 5244 - DNA, 661 bp, Homo sapiens
  LOC117584
  misc_feature [331]..[331]: Chromosome 17, SNP identification no. = rs7216074
  misc_feature [331]..[331]: allele = g, in linkage disequilibrium with rs9303681, respectively
  misc_feature [331]..[331]: n is a, t, c or g
caattattggctggcaacagattaggggtgaagggaaacccttacaaagctggtccttcaccacagatagtttaagaagcacaaacttttcacactatgaagtgccagttcagtcattattgttctgaaggaatcaaagtacctttgccctcattatcttatagcttctgatttaaaggcaatcagataaaccagcaaggaggcaccctggcataatccaagcttgatcaacccatggcctccgggcccaacacaaattcataaactttcatcagctatcattagtgttagtgtattttatgtgtggcccaagacaattcttcttcttccnatgtggcccagggaggccaaaagatggcacaccccagactataatctaatggaaagagcacaaatccacagtagtcagccaacctagcttctggtctgcaagagtcaaataactagctggatatcctagttaagtctgagcctcttgacttttctgtgctttaaattcctcctctgcaaaataatagcatttctcaatctttttttttatgtgtggttctttctcacataaattctttctccaagtggggtctacagataaactacatcagaatcccacatctctatcccaaacactttgattctgtagggctgggctaggaaccaggaa

SEQ ID NO: 5245 - DNA, 661 bp, Homo sapiens
  RAD51L3
  misc_feature [331]..[331]: Chromosome 17, SNP identification no. = rs4796033
  misc_feature [331]..[331]: allele = t, in linkage disequilibrium with rs9303681, respectively
  misc_feature [331]..[331]: n is a, t, c or g
atgcagacataaatatgacatgatccttccactcagggggctttactgttcagcagggaagatgaacatgtaaacaatgaggtatgtgatttaggtgctcgggaattccatcctgggagtagcaagcatagttggagtcaccagattgcacatctgcatttccaaacagtctgtagtaggacacctgcccacagagatagcacctagaaagctgaattaagcaaggaggggcagaacagcaggctcacctgctgggccacagtgcctcggagctcctgcagcacatccagcatctggaagatgtcaaatgcatgcaccacctggatcctcnggagagcttctgcctgaagcggtggaaaagaaaagcaaggactttggataagagggagtaggggggtcaaggtaaggctgagaaggaagaggcacctggatgcaaggactcaggtccagggtggcaaatgagctttgtctaatggtcagttgtcacagtggtggctgcctgggtgctgagctgtaaagtactcagaactcagcaggaaagagggatatgactgattagtgatgtctctcacaggtgagaaatggactggaaacacaaagcttggtgtttgccagccctggtttagggcatgcaaagagttgggagggtttcctggaagaa

SEQ ID NO: 5246 - DNA, 661 bp, Homo sapiens
  RAD51L3
  misc_feature [331]..[331]: Chromosome 17, SNP identification no. = rs9915078
  misc_feature [331]..[331]: allele = g, in linkage disequilibrium with rs9303681, respectively
  misc_feature [331]..[331]: n is a, t, c or g
caaaaaaaagaaagaaagaaggaaagaaggaaaggaaggaaggaaggaaggaaggaaggaaggaaggaaggaagaaagaaaaggaagaaaggaaagaaagaaagaaagaaagaaagaaagaaagaaagaaagaaagaaagaaagaaaggctagaaacctggtgagtcagctttgattcttcacaatacattccaaactccgacaaaaaaaaaaaagaaagaaagaaagaaaggctagaaacctggtgagtcagctttgattcttcacaatacattcctcctggtagtaggtcttgtcacagttcctcttcaacatgtctcccactgttctngactggactcacataccccaggccagcactgccagggccctgcttggcctctgccacccttccaccctgcacacctctaccccactgtctataaccctgctttcacaatggcctcccgcctccagggagacagccgggcagatgagttaagagccgcgttcttagacttaggagtgtgacaagcatgaactcaaataactggtctgccgtttgctaactgcacaatcttgaacaagtcatttaacctgagtcccaatttcttcacctatagaatgatgatttatttttattttattttattttattttatttttttgagatggagtcttg

SEQ ID NO: 5247 - DNA, 661 bp, Homo sapiens
  MYOM1
  misc_feature [331]..[331]: Chromosome 18, SNP identification no. = rs4340411
  misc_feature [331]..[331]: allele = t, in linkage disequilibrium with rs4507002, respectively
  misc_feature [331]..[331]: n is a, t, c or g
gggcaggactgatcatggagggcctgtgggccattgaagggagttgatattctgagttaaagaaggaatccatgacagttttgagcagaatagcgacatgctctgactcagtggtaacagcatcactgtgactgttgcagaagcaagttcccttgttaggaggctagtgctgtagtccagccagggccagatgtgcagtaagagcggatgtgcgagcagtggccagatgtgaggatctactggtcatggctgagttctgaattccgtcagatttctcccagagttcctcagcacccttagccagggagttttgaggctgtgaaatggtctntggagattttgcgcatacaatgaatcttctgagactctctttaggtggtatgatgatagtaaaaccattcacttgttccccattttcccagattccctctacatcgtgtcaaagaaatgccttattcttttgttagtgtttttctggtatttaataggaaaagcaccttgaaataaccatagttgtatggagactcaaatccatctggagactgaagtgactgaatctgaataataaaaaatattgagccaattgactgttaccggaaatgaaatttgcttaggaagctgctgatagtctgggcacagtggctcatgcctgtaatcccaa

SEQ ID NO: 5248 - DNA, 661 bp, Homo sapiens
  MYOM1
  misc_feature [331]..[331]: Chromosome 18, SNP identification no. = rs4507002
  misc_feature [331]..[331]: allele = g, a
  misc_feature [331]..[331]: n is a, t, c or g
ctgtctttagccctgcctcttaacattgtcttggattcaacctaggtggagtcttcattctctcatccagctcctcggcctcatcggaacatttccaccaccattactcctttggaaactggtaagtgtgacactgaggcagaagaatgcacttgatagcttatgagcttagcagcagtgcagtgtaagtgctttctttctgtcttctgaactcagcagttttctcaaagagatgtcagaataacagagaaataggaaagtgaagctccagggagggaaaccagaacagccgggtgccagtcgggctggcacagctcttctctcacatcantgtattcttctgaaattaagctgctgttcctggaactgtaaggaggtcatatctgcctcggattgaactgtaagcgtgtgtttaatgctatttccaagtacggtttggttgaaatctgaaatggatgagagacaggaggccctgcattttcaatcctgcatgtgccatacaatgctccctggttacaaattagaccgaaagaaggaaaattaactctgaagtcactagtttataattcagggatcttgctgtgacgatgcaatgtggataaatgtgagcgcgcacaatgatatggcctcaaatggttaagtaatatttcagaggcaacat

SEQ ID NO: 5249 - DNA, 661 bp, Homo sapiens
  MYOM1
  misc_feature [331]..[331]: Chromosome 18, SNP identification no. = rs7237476
  misc_feature [331]..[331]: allele = t, in linkage disequilibrium with rs4507002, respectively
  misc_feature [331]..[331]: n is a, t, c or g
tgagacgcaactcagtgttttatctttcctaactcagagtagggtcagtccatctaataagagattctctttctttgttctttaaatggtgtgaccaattaagaggaggtgtaacccggttgtgagagcctgtgttgtggattcagaccagatctagatcccactatattgatagcacttagtagccatgtaatctccagcaatttatttctccttcctaagcttcaggttttttgtctataaaatggggataatcatatccaaattataggattgctgtggtgattaaatgtgatactgcagacagagcacttgacctagtgacagtcanataatatagactcagtaaatatcagctgttattactgataccaataatataaaagctcattgttagattacatgtatgcagcaggttggtattttgatctactggccttatgttctgacagtgatattacatcaactgaataaaggtcacctgtgtctatcaaaattgtttttctttctgagacagggtctcactctgttgcccaggctggagtgcagtggtgcagtcttggctcactgcaacctctgcctcccaggctcaagcaatcctcccacctcagcctcccgagtagctacaggcgcatgccatcacactcggctaatttttttt

SEQ ID NO: 5250 - DNA, 661 bp, Homo sapiens
  misc_feature [331]..[331]: Chromosome 18, SNP identification no. = rs10468735
  misc_feature [331]..[331]: allele = c, in linkage disequilibrium with rs4507002, respectively
  misc_feature [331]..[331]: n is a, t, c or g
tgttacttttacaaaaatcatatggttttttttttcctttaaaagtaagaaccagaataaagatcagcagatctgagttttcagtttcaattcatttcgaatttccttttaacagtttatagcaataaaattgacacaccataaattaatccattttaagagtaaagttcagggagttttagtcaatttttacattgtgcaaccatcaccaaaatccagttttaaaacacttccatcacccagaaaagtttcctcaggcttgtctgcagttaatcctgggtcccgcgcgtgaccgaggccaccactgacctctgtctctacagttcagctntttctagaaatttcacacaaatggaatcctaccatatgtagtcatttgtgtctggtttctttcacttggcaagatgtttttgagtttcatctggatactggatgcaccagtattgcacttggttctcaccaatgtcctaccctgtccgcagttgtcctttcaataacaatgaatgaatgtgttgtattgctctgctataatttgttacctggtctctaagtgttgagcacctggaaatttccagtcattcaccaggactagaagctggaagcaggcatttggagcatctttagtttcaacccagctcttttatcacctctctgtgacttc

SEQ ID NO: 5251 - DNA, 661 bp, Homo sapiens
  misc_feature [331]..[331]: Chromosome 18, SNP identification no. = rs4632225
  misc_feature [331]..[331]: allele = a, in linkage disequilibrium with rs1466882, respectively
  misc_feature [331]..[331]: n is a, t, c or g
tattcgttaataaatcattcattaataaaccttaatgaaatctatggcttcgacactttagatgctgaaatttagggatctaataattaaaaatagctaaagtttccttccgcttagaaaaaattaatacccgtgctacaaaactttgctgtgtatcgattcattaattactttctcttggaattttttaaacatatatctatcagaaagtgcacaccagttgaaaaggggtggtatggacagtagctgcttcactttcctagttttaacgtaacccagaacctgttgcaagagctttatattttacataatagttgggttgcaagtgacngaaatgaaatatagaatcatatattttaaaagggttcaataacaaagtcaaagaaacagtatggatgaatccaggttctggaaagactggatccaggacattaggcagctttaggactcattcttaatccttttatttacctcttagctctgcttttcttcattaatttaaatttgccattcctttatggatggaatcatagccacggccagttctgagctaatattcttacagcaaggttccttgacatcagagctattgacattttggtctggataattctttgttttggagatctgctccatgcagtgcaggatgtcaagcagcctc

SEQ ID NO: 5252 - DNA, 661 bp, Homo sapiens
  misc_feature [331]..[331]: Chromosome 18, SNP identification no. = rs11081160
  misc_feature [331]..[331]: allele = t, in linkage disequilibrium with rs1466882, respectively
  misc_feature [331]..[331]: n is a, t, c or g
gttgtagttatacagcttttttgggggttctctattctgttccattgatctgtgtgtctatttttgtaccagtaacctgctgttttggttactatagccttgtagtataatttgattaaatgcctccagcttcattatttttgtttactattgccttggctatttgggttacttttggttccatgtgaattttagcatttaaagtaaaagatgagaaagatacaatgtaaaacacaaatcagaaggaaactggagagtttgtattactatcaaaaaaatcagacttagaacaatgtgtattatcagaattatcggaaatcagaacataaanataagggagtaagtttattttaatctttttaaaagtgtgtattaatctaataacaaagctttaaatacacaaaggaaaaactgattgaaatgaaaagagatagaaacaaatccataattattgttggagaattcaccctctaagttattaataaaataaatagatcaaaataatcagtaaaaatataggtgacagtagcagaatacacattatttttaagtccctatggaatattcaccaacataggccacacagtctgggtgataatgaaactcccaataaatatggaaggacaaaaataatacagaatatgtcttcagacaatagtgg

SEQ ID NO: 5253 - DNA, 661 bp, Homo sapiens
  misc_feature [331]..[331]: Chromosome 18, SNP identification no. = rs4381685
  misc_feature [331]..[331]: allele = a, in linkage disequilibrium with rs1466882, respectively
  misc_feature [331]..[331]: n is a, t, c or g
agtttgtattactatcaaaaaaatcagacttagaacaatgtgtattatcagaattatcggaaatcagaacataaagataagggagtaagtttattttaatctttttaaaagtgtgtattaatctaataacaaagctttaaatacacaaaggaaaaactgattgaaatgaaaagagatagaaacaaatccataattattgttggagaattcaccctctaagttattaataaaataaatagatcaaaataatcagtaaaaatataggtgacagtagcagaatacacattatttttaagtccctatggaatattcaccaacataggccacacantctgggtgataatgaaactcccaataaatatggaaggacaaaaataatacagaatatgtcttcagacaatagtggactaaaactagaaatgaaaaacagaaaatgcattcctattaaaaaattcagtatctttcttctaaataatcaatgtctcagaaaagaaattatgagagaaatggatagtattttgaattgagtacaaatggaaacaacataaatatttgtgagttacagcaacatttgtgctgagaaaaatcacaatctttaatacttttatttaaaacagaaaaatttcaaaacaatgatccaagctttccccttatgaaacta

SEQ ID NO: 5254 - DNA, 661 bp, Homo sapiens
  misc_feature [331]..[331]: Chromosome 18, SNP identification no. = rs12458527
  misc_feature [331]..[331]: allele = g, in linkage disequilibrium with rs1466882, respectively
  misc_feature [331]..[331]: n is a, t, c or g
cttctcccatggatttttgtagccctggccttagaagatcccctcatgagcccatcccaccagggccatcagactgacatgcagagataacatggagttttggaagagctgccaattaggcacacctggagtactggtagccttggatttctgagcatcccggcatcagcactgcagctctggcaaaggggcaggctaggctccctcacaggcccccaggaaaggggccgaatccagaggactgagcagtgatggtctgcaggcctcaattccaatgaatctctcaggataagacctactaagctgggactccagccatctgccactgggnctcttggcctggtaacaactctgtacttcccttggatgaagctgtcacagggagggacaggctgctatctttactgtcttgccatcctggctgttgttgcctccatactctggagagtccatggtgatgagggattggtgtggaccctcagcacagcattacagccccacataaaagcagccagaatgttttttacgtgggtccctgatcttgcttctcttcactgggcagaacctcctgtgctggggctctagccaccccctgcccctgcccttgggctagtagcagctctgcatttccctgggacagagctcccagagggaggggcac

SEQ ID NO: 5255 - DNA, 661 bp, Homo sapiens
  misc_feature [331]..[331]: Chromosome 18, SNP identification no. = rs1604290
  misc_feature [331]..[331]: allele = c, in linkage disequilibrium with rs1466882, respectively
  misc_feature [331]..[331]: n is a, t, c or g
atgctccatcttgataacctccatccctatccatatgctgaattctatttctatcatttcagccattacctcccagttaggaacccctgtgggggtactagtgtcatcgtttggtggaaagaagacacaggctttttgagttataagagttcttgtgctagttctttctcatctccgtgggcaggtgttcctttaactgtggtataaattgagaagtcagtagacttctttcttgatgttttcagagtgtcaaggctttctaccaggtctttatttatagctgccttcttgtctttagtttcacaggggggtatgttaacaaagtattttngttattgaactttcaattgtgatccagtacatggtgcttaagcataatggtctggttggtagataggctcttgctcagtcaagtggctcttctgtatttcctcacaattgcagccatgctccttctcagtgctttgaaagtgtgcgctcctctctctattaaagagctggctgccaatctcagctttgctctcctgggctgcccaccacagctctgggatgatctcagggtttatattccctcctcagcttggagacagcaggaaaaggaaccttaatagtggttgtggcagaagacctttcagttttctcttgatctttaccccagaga

SEQ ID NO: 5256 - DNA, 661 bp, Homo sapiens
  misc_feature [331]..[331]: Chromosome 18, SNP identification no. = rs1604289
  misc_feature [331]..[331]: allele = a, in linkage disequilibrium with rs1466882, respectively
  misc_feature [331]..[331]: n is a, t, c or g
ctccaagctgaggtgtgttcttcagttctatcaaatcagtttgcatcttttctatactggttgttttgtctatcatcagctcttgtattgttttgtattgttttattatcattcttagatttcttggattgggtttcaacatgctccatcttgataacctccatccctatccatatgctgaattctatttctatcatttcagccattacctcccagttaggaacccctgtgggggtactagtgtcatcgtttggtggaaagaagacacaggctttttgagttataagagttcttgtgctagttctttctcatctccgtgggcaggtgttcntttaactgtggtataaattgagaagtcagtagacttctttcttgatgttttcagagtgtcaaggctttctaccaggtctttatttatagctgccttcttgtctttagtttcacaggggggtatgttaacaaagtattttggttattgaactttcaattgtgatccagtacatggtgcttaagcataatggtctggttggtagataggctcttgctcagtcaagtggctcttctgtatttcctcacaattgcagccatgctccttctcagtgctttgaaagtgtgcgctcctctctctattaaagagctggctgccaatctcagctttgct

SEQ ID NO: 5257 - DNA, 661 bp, Homo sapiens
  misc_feature [331]..[331]: Chromosome 18, SNP identification no. = rs8092847
  misc_feature [331]..[331]: allele = a, in linkage disequilibrium with rs1466882, respectively
  misc_feature [331]..[331]: n is a, t, c or g
actgatttgatagaactgaagaacacacctcagcttggagcagtggctcatgcctataatcccaggactttgggaagctgaggtgggcagatcacttgaggtcaggagttcgagaccagcctggccaacatggtgaatccccatagttgggcatggcacctgtaatgtcagctactctggaggctgaggcaggagaatcgctggaacttgggaggtagaggttgcactgagccgagatcacaccattgcactccatccagcctgggtgacagagggagacaccaactgaaaaaaaaaaaaaagaactaaaaaacacactctaaagatttcncaatgcaattgaaagtattaacagtggaatagatcaagctgaagaaagaatctcagagcttgaagactggatttctgaaataagacagacaaaaaaaagaaaaaaaataacaaaacccttgagaattacgggattacgtaaagagaccaaatctatgactcactggcatccctgaaagaaaaagatagaaagcaattaacttggaaaacatatttcaatatatcatctataaagacttccccaacatctctagagagaccaacattcaaattcaagaaatgcacataactcctgcaaaatacaacacaaagcagactatccctaagacat

SEQ ID NO: 5258 - DNA, 661 bp, Homo sapiens
  misc_feature [331]..[331]: Chromosome 18, SNP identification no. = rs11664775
  misc_feature [331]..[331]: allele = a, in linkage disequilibrium with rs1466882, respectively
  misc_feature [331]..[331]: n is a, t, c or g
gctgaggcaggagaatcgctggaacttgggaggtagaggttgcactgagccgagatcacaccattgcactccatccagcctgggtgacagagggagacaccaactgaaaaaaaaaaaaaagaactaaaaaacacactctaaagatttcacaatgcaattgaaagtattaacagtggaatagatcaagctgaagaaagaatctcagagcttgaagactggatttctgaaataagacagacaaaaaaaagaaaaaaaataacaaaacccttgagaattacgggattacgtaaagagaccaaatctatgactcactggcatccctgaaagaaanagatagaaagcaattaacttggaaaacatatttcaatatatcatctataaagacttccccaacatctctagagagaccaacattcaaattcaagaaatgcacataactcctgcaaaatacaacacaaagcagactatccctaagacatgtaagggcagctcacctacaaagggaagcctggcaggctaacagtgggccttttagcagaaactatagaagccagaagagattaagggtctatcttaaacattcttaaaaaaaaatattcgactgggcgcggtggctcatggctgtaatctcagcactttgggaggccgaggcgggtggatc

SEQ ID NO: 5259 - DNA, 661 bp, Homo sapiens
  misc_feature [331]..[331]: Chromosome 18, SNP identification no. = rs13370240
  misc_feature [331]..[331]: allele = c, in linkage disequilibrium with rs1466882, respectively
  misc_feature [331]..[331]: n is a, t, c or g
ggtggcagttgcctgtagtcccatctactcaggaggctgaggcaggagaatggcattaacctgggaggcagagcttgcagtgagctgatatcgtaccacagcactccagcctgggtgacagagtgagacgccatctcaaaaagaaaaaaaaaaattcaaacaaaaatttcatctccagccaaactaagcttcataagtgaagaaacaagatcaattttagacaagcaaatgctgagagagttcattactaccagggctgccttataagagatcctgaaaggagtgccaaatatgaaaagaaagatgactatcggccactacaaaaaatatntaagtacacataccagtgacactataaagcaaccacacaaacaagtgtgcatcataaccagctaacaacatgatgacaggatcaaacccacacatatcaatattaacattgaatataaatgggctaaatgcccatttaaaaggtatagagtggtacactggatagaaaagccataccaaagttatgctgtcttcaagagactgatctcacaggcaatgacacccataggctcaaaataaagagatggagaaaaatctaccaagcaagtgagaaacaaaaaaacgcaggggttgcaatgctaattttgaacaaaacagacattcaacaaac

SEQ ID NO: 5260 - DNA, 661 bp, Homo sapiens
  misc_feature [331]..[331]: Chromosome 18, SNP identification no. = rs7241459
  misc_feature [331]..[331]: allele = g, in linkage disequilibrium with rs1466882, respectively
  misc_feature [331]..[331]: n is a, t, c or g
aaaaaaaaaaattcaaacaaaaatttcatctccagccaaactaagcttcataagtgaagaaacaagatcaattttagacaagcaaatgctgagagagttcattactaccagggctgccttataagagatcctgaaaggagtgccaaatatgaaaagaaagatgactatcggccactacaaaaaatatgtaagtacacataccagtgacactataaagcaaccacacaaacaagtgtgcatcataaccagctaacaacatgatgacaggatcaaacccacacatatcaatattaacattgaatataaatgggctaaatgcccatttaaaagntatagagtggtacactggatagaaaagccataccaaagttatgctgtcttcaagagactgatctcacaggcaatgacacccataggctcaaaataaagagatggagaaaaatctaccaagcaagtgagaaacaaaaaaacgcaggggttgcaatgctaattttgaacaaaacagacattcaacaaacaatgatcaaaaaagataaagaagagcattacataatggcaaaggattcagttcaataataagacctaattatgataaatatatatgcactcaacatagaagcacatagattcataaagcaagttcttagagactcatgaaggg

SEQ ID NO: 5261 - DNA, 661 bp, Homo sapiens
  misc_feature [331]..[331]: Chromosome 18, SNP identification no. = rs13380903
  misc_feature [331]..[331]: allele = a, in linkage disequilibrium with rs1466882, respectively
  misc_feature [331]..[331]: n is a, t, c or g
tcaaaataaagagatggagaaaaatctaccaagcaagtgagaaacaaaaaaacgcaggggttgcaatgctaattttgaacaaaacagacattcaacaaacaatgatcaaaaaagataaagaagagcattacataatggcaaaggattcagttcaataataagacctaattatgataaatatatatgcactcaacatagaagcacatagattcataaagcaagttcttagagactcatgaagggacttagattcccacacaataatagtgagagacttcaaaacacacctgacaatattagacagaccatcaaggcacaaaattaacaaagntactcaggactcaaactcaacacttgaccaaatggacctaataaagatcttcagaactcttcacccaaaaacaacagaatatacattcttcccattgctacatggcacatactctaaaattgaccaaataatcagacataaaacaatcctcagcaaatttgaaaaaatcaaaatcataacaattatgctctcagaccacaacacaatcaaaatagaaatcaatattaagaaaattgctcaaaactatacaattccatggaaattaaacaacctgctccttaatgattttggggtaaataatggaattaaggcagaaatcaagaagttctt

SEQ ID NO: 5262 - DNA, 661 bp, Homo sapiens
  misc_feature [331]..[331]: Chromosome 18, SNP identification no. = rs1604288
  misc_feature [331]..[331]: allele = g, in linkage disequilibrium with rs1466882, respectively
  misc_feature [331]..[331]: n is a, t, c or g
aggagtggtactagctcttctttatacatacggtagaatttgattgtgaatctttctggtcctaggctttttttggtaggtaggctttttattacttattcaatttcaggactcatcattgatctgcccagggattcaatttcttcctggtttagtcttgggaggttttatatatccaggaatttatccatttcttctagattttctggattatgtgcatagtctctcatggattttgcatttctatgtcatcagtcataatgttccttttgtcatttccaattatgcttatttggaccttctgtcttttcttattagcctagctagctgngtatgtattttattaattttttcaaagtacaaactcctggatttgccattcttttgtatgtttattcctgtgtcaatttctttcagcttacctctgattttggttattttttgtcttctgctagccttagggttggcttcatctttctttttagttcttttagttgtgatgttaggttgttaattcaagatctttctaagtttttcatgtggctctttagcactataaatttccatcttaacattgccttagccatgtttcatagattctggtatgttgtatctttgttctcattaatttaaaagaacttcttgatttctgccttaattc

SEQ ID NO: 5263 - DNA, 661 bp, Homo sapiens
  misc_feature [331]..[331]: Chromosome 18, SNP identification no. = rs1501045
  misc_feature [331]..[331]: allele = t, in linkage disequilibrium with rs1466882, respectively
  misc_feature [331]..[331]: n is a, t, c or g
ttttttatgccagataaaaacacagagcaatgcaacatgatattgaaacaagatcgaaggaactcacttctttttattgaagggcaaaattttaaaagaccatgatcagcttgaaagagaacatttggcttctaacaggcatgcatgtgcatgcatatatatgggtttgataaatacgcctccattttctgtgatagaaggaaaaaatttaaatgtaaaattgacagtttgtaactttcactagataagctaatgcttggatttttctgagctgaaatcttaatttgacagaaatgagctactttttaatctcatctttacagttcctttnaattgacataattgcacatatttatggtatacatcacgatattttgttatatgtgctcattgtgcaatggttaaatcaatctaattagcatgtccattacctcatatacttaccttttttcatgatgagaacatttaaaatcgactttctcggcagttttttacagaaaaaaatacagtattaactgtagtcaccatgttgtacaataaagcttatgaatctttggccacatattctgagttagaagagtgaggtgacagaagtaaattaaacccttgtccaatctcattaactaatgtgatgagggctcacacaccactgggagaacac

SEQ ID NO: 5264 - DNA, 661 bp, Homo sapiens
  misc_feature [331]..[331]: Chromosome 18, SNP identification no. = rs12960297
  misc_feature [331]..[331]: allele = g, in linkage disequilibrium with rs1466882, respectively
  misc_feature [331]..[331]: n is a, t, c or g
atagtcaccaaaacagcatggtactggtataaaaataggcatgtagaccaatggaacagaatggagaaccccaaaataaagccagacagttacagcccactgatcttcaacaaagcaaacaaaaacataaagtggggaaaggacaccttatttaacaaatggtgctgggataattggctagccacaagtagaagaatgaaactggatcctcatttctcaccctatacaaaaatcaactcaagatggaggaaagacttaaatctaagacctgaaaccataaatattctagaacataacactggaaaaactcttctatactttgacttaggcnaagagtccatgacaaagaacccaaaagaaaattcaacaaaaacaaagataaatagatgggacttaattaaagtaaaacgtttctacttagcaaaataaatagtaaacagacaacccatggagtgggagaaagtatttgtaaattatgcatctgacaaaggactaatatctagcatgtacaatgaactcaaaccaatcatcaagagtaaaaaaaaaatcctattaaaaaagtgggctaaagacgtgaatagacaattgtcaaaagaagatataaaaatggccaatggacatattagaaaatgctcaataacactaattatcagagaaatgt

SEQ ID NO: 5265 - DNA, 661 bp, Homo sapiens
  misc_feature [331]..[331]: Chromosome 18, SNP identification no. = rs1587544
  misc_feature [331]..[331]: allele = c, in linkage disequilibrium with rs1466882, respectively
  misc_feature [331]..[331]: n is a, t, c or g
ccttgagctgtgcagcctggggttagggtaggagcgatgccagcacttccttagtcacctgggctagtgtctcagtagtaacatgcccccaaggtctgctggctctgggcccagtacagcactaggaggcacctaaaatttgcagtccgtgtggtctagactgcatttcaagttgctttagagctctagagaactttagcccatgttggcaaggttaataggaactcaagtttcagccactgagatcagcagttccgctctggctacggctggtttaagtgctccctccatgcatgagtgtcaactgagtttggtctggttttcctttctncttgaacaggacaggactgagttcaatacctcacaatggctgtgttctcccttcccaagcacagagaaacactctctgcaccactttgccactgccgggggtgttgaggagaaatgacactgctgattcaagactattttttctacttctttcagcaatatgaagttgaaaccagatactgtgatttttggttcttatgaaggtgcttttttgggtgcagatagttgctatattggtgtccttgcaggaggagcaatttatggagccttctattcttccatctttttctaccccactcctgattgttaaacatggggtctttcttttgag

SEQ ID NO: 5266 - DNA, 661 bp, Homo sapiens
  misc_feature [331]..[331]: Chromosome 18, SNP identification no. = rs1995314
  misc_feature [331]..[331]: allele = a, in linkage disequilibrium with rs1466882, respectively
  misc_feature [331]..[331]: n is a, t, c or g
tttggcatttaaaattattttgtaaactgtgttttccaataagtacggcttaggtcagggatgtttaagtgggaatgtgcatcagaaacatcttgggagatttttaaaatacggagtcccagaatcagtctcggatccctgaatcagaagccttaagaagggaggcctgggctgttgtgttttgaaaagctgtgaaaatgccttaggtggttttaatgtggcattgcctttggaaatataatgactagaacctagtacagtttgtttcacatggaagactgttgccctttttagtatatttacaattgagtaagattttaaaagtcagggngattttttttgaagagaaaagcatgatagtttcctgactaaacatcttcagtgacttctcatggcactttgaataaaatccaagtcctacatgttctagcccagggccacctctccaatgtcttttaccactctcttgctgccttagtctgttctcactgctataacaaaatactgaaactgggtaatttttaaacaatggaaatttattgctcacagttctggtggctgggaaatccaagatcaaggcatcaacatatttggtgtctagtgagggcttagtctctgcttcaaagatgatgcagtctatctgtgacctcacatggtggaa

SEQ ID NO: 5267 - DNA, 661 bp, Homo sapiens
  misc_feature [331]..[331]: Chromosome 18, SNP identification no. = rs2321278
  misc_feature [331]..[331]: allele = c, in linkage disequilibrium with rs1466882, respectively
  misc_feature [331]..[331]: n is a, t, c or g
agtggtaaaagacattggagaggtggccctgggctagaacatgtaggacttggattttattcaaagtgccatgagaagtcactgaagatgtttagtcaggaaactatcatgcttttctcttcaaaaaaaatcaccctgacttttaaaatcttactcaattgtaaatatactaaaaagggcaacagtcttccatgtgaaacaaactgtactaggttctagtcattatatttccaaaggcaatgccacattaaaaccacctaaggcattttcacagcttttcaaaacacaacagcccaggcctcccttcttaaggcttctgattcagggatcngagactgattctgggactccgtattttaaaaatctcccaagatgtttctgatgcacattcccacttaaacatccctgacctaagccgtacttattggaaaacacagtttacaaaataattttaaatgccaaattttcaatagataaaaaactgtatgataaattggcatttcaaaataatatgttttttccacaattattcttcacaatactaaggggactcagcattatttagatgggaacacaggtacttaaataacctctttgaaattatcactcgtcactgaatttctgatctcttttatcacctgaagcctatcttaatgctact

SEQ ID NO: 5268 - DNA, 661 bp, Homo sapiens
  misc_feature [331]..[331]: Chromosome 18, SNP identification no. = rs1466882
  misc_feature [331]..[331]: allele = c, a
  misc_feature [331]..[331]: n is a, t, c or g
aaaagaagggagaagtgtgtagtcatgttgatcttactcgtttgtgacatctaaaaataatgtgactttaagctcccaaggggatgatgaggattatttctcaggctcagagaaaacagcaagtttagaagttctctgtgtgggtcatatctctgacctaatcctttcagtttacccagcacactggtccagcaaggagaatgaatgtaggttaggttgacatgagttcatagctatgctgctgagtttatcagaagcagagaaaatatgaagcaaataggccagatcagccacattaagtaaatcccgttgctatgcttcagaattaatntgaggagctaaaacgttattagccacaatagtaaccaagggagacttcagttagaatgatgtcctaaaggactgtgtaaaggaagatcaaaagaaatctgtcagaaaatgcaatagcttcaagatcgaacattaggttagaggacaatataaacctgaattgtttggtacagttctatatagattgtctgtgccagccaggaaacatgttgagtagcattaagataggcttcaggtgataaaagagatcagaaattcagtgacgagtgataatttcaaagaggttatttaagtacctgtgttcccatctaaataatgctgagtcccctta

SEQ ID NO: 5269 - DNA, 661 bp, Homo sapiens
  misc_feature [331]..[331]: Chromosome 18, SNP identification no. = rs8088956
  misc_feature [331]..[331]: allele = a, in linkage disequilibrium with rs1466882, respectively
  misc_feature [331]..[331]: n is a, t, c or g
tcaaaatagattaaagacttacatctaagacctgaaactatgaaactaataaaataaaacaatgtggaaatgctatatgacatttctctggacaaagatttttgggggtaagacctataaagcacaggtaacacaagaaaaaatagacaaatgggataacatcaagctaaaaagcttcagcacaacaaagaaaaaaattaacaacatgaacagacaatctgaagaataggagaaaatatctgcaactatcccatctgacaagggattagtcaccagaatatataaggagctcaaacaactcaacagcaaaaattaatcccattaaaaaatnggcaaaaggtctgaatagacatttctcaaaagaaaacatgcaaatggactataactgtatgaaaaaaatgctcaacatcactaatcatcagaaaaatgcaaatcaaaaccacaataagatatcgcctcactccgtttagagtcactgttatgaaaaagacatgaagaaaggagaatgctcatacactgttggtgtgaatgtaagtagtactgctactatagaaaacagcatggagttttctcaaaaaaatgaaaatagaagtactatatgacccagcactcccacttctgggtatatacccacaagaatgaaaatcagtatattgagata

SEQ ID NO: 5270 - DNA, 661 bp, Homo sapiens
  misc_feature [331]..[331]: Chromosome 18, SNP identification no. = rs7229501
  misc_feature [331]..[331]: allele = t, in linkage disequilibrium with rs1466882, respectively
  misc_feature [331]..[331]: n is a, t, c or g
tcctacaaaaggagagttcatctctcccttctgtttgctctttaactaacagcatttaactctttctgtctgtcacataattagacatgtacatgtctgccttccctatcagacaataaattttatgatggcaaggttcatcacaaagtttattttcatatttcacccaacacctggcatatagtgggcattcagtaagtattataacattggatataattttgtaacattggatgtaatctttcttgactattctaaagagcggtagccaggaagaggcatcctcaaaagcacatcagactgaacaattggcagagtttacttataatcnggtatccaaaagttaatctctcctgggttcagcaccatcttctgcaaaacaagagggctgagctaggctacctccaagtccatttgccttccaatcctttatgggtctactaatctactttgaaagtctaaaagtgtttccgtttgattatctaaaaatgatcagattccactaataatgacctgaaatatatattttactttccatgtttttattattccctgcagagtccagatctgatttttaccatctccaggatttcagtatcaaactctgtcaacccatttcgagatttcttctaataagtcaaaaactgactttgtattttac

SEQ ID NO: 5271 - DNA, 661 bp, Homo sapiens
  misc_feature [331]..[331]: Chromosome 18, SNP identification no. = rs2221230
  misc_feature [331]..[331]: allele = g, in linkage disequilibrium with rs1466882, respectively
  misc_feature [331]..[331]: n is a, t, c or g
tggacatgatcaatctggatgaatgttctatgtgcacttgaagaaagtttgcattctattaagtggaacattctagaaatatcaattaggttaatttggttaatagtgttattcaggtcttccatatctttacctgttttctctctacttgttctgttgtttactgagagaggatctttgaaggttcaactttaattgtgaatgcgtctattttcacttttagtttgctcaggttttgcttcaagtatttggaagatctgttgttaaatgcacataaattttttatgctttcttgatgactcatcccctttgtcatggttttttttttgcnatgtcactttttatccatatttcttcttctaaagtctactttttctgatattaatataggcattccagctttcttttaattcatgtttatataatatattctttgccatctttttacttttaatctatgtctatatccttaaaaacggattacttgtaaatagcatataatgggatcacttttctctttttattggtgtgtttccaccgatccctgggcaaagttggcactgacatttttaccttacttctctggctgtgcagttatttatttcttttacctttgtttgttgactaggtatctaagcttttctaaggaaaagtcaggatg

SEQ ID NO: 5272 - DNA, 661 bp, Homo sapiens
  misc_feature [331]..[331]: Chromosome 18, SNP identification no. = rs2133995
  misc_feature [331]..[331]: allele = c, in linkage disequilibrium with rs1466882, respectively
  misc_feature [331]..[331]: n is a, t, c or g
gtaggagaataaatactgtcaactacagtggggatatgcatgcatgaatcctacttgtaatacagagcaaatgcaactcttgtacactagtggtggaagtgtatattcgcagccatgttagaaaatcacttggcttatgcacacacaatcacacaggaattccactcttaggtatacatctaacaatactaagtttgtatagacaccaaaggacatatagaagaatgttccgtagcagctctgttcacatcagctcctaagtggagtcaaaaacaaaaaagccaatttatagtagaataagtaaatgaattttggtatatttacacagtgncatgtaacagtgagatcaattaactattgccatatgcaacaccacaaatgaattcctccccctaaatatgttggtgtacagaaatgctagtgatgtttgcacattggttttgtatctggagactttgctgaagttgcatattagcttaagaagctgttgggctgagacgatggagttttctagatatagaatcatgacatctgcaaacaaagagagtttgacttcctatttgaatatgctttatttctttatcttgcctgatttccctggactgaagttccaatactatgttgaataggagtggtgagagaaggcatccttgtcttgtgc

SEQ ID NO: 5273 - DNA, 661 bp, Homo sapiens
  misc_feature [331]..[331]: Chromosome 18, SNP identification no. = rs2874484
  misc_feature [331]..[331]: allele = t, in linkage disequilibrium with rs1466882, respectively
  misc_feature [331]..[331]: n is a, t, c or g
attggacagcatcaaggtggtttcctcctgctgtccagacagtccttcctaaactgccctggcttgccacatttgtagcggttatcaagtgtatccagtgactctggggtttgtgagcatgtgaagtggctattagagcctctgcctttttcttgtgtctccttttcctgtcttgggcctccttctaatctgtattgtaaaataccaaggtgaccactttcaggaggttctctaaagcactatctggtcaaatggcctgtctctgcagcttcctcctgatatcaggggctgcaagagtaataaatttatcctttagaattagttttccttngactgaatcaggagatagagaggtgtgctttaccaaggcctctcttagcctttctaagaaggcagtgggattctcttctaatccatggtctatcatggatagtttggagtaattgattggcttagtcctagttctccataagccctccagtacacacatctgaaagtgcttcctcttccattctcccatttcatcattggggtcccatttagggtcctccaatggtactgctattcttccaattggataaagctcatccccttccctggcactaaataagatccaaagttcatctccaaaattctctgccactgtacagcagcctgcttt

SEQ ID NO: 5274 - DNA, 661 bp, Homo sapiens
  misc_feature [331]..[331]: Chromosome 18, SNP identification no. = rs1304794
  misc_feature [331]..[331]: allele = g, in linkage disequilibrium with rs1466882, respectively
  misc_feature [331]..[331]: n is a, t, c or g
gtccttttttaagagtccctaaactccacaatagccaaaatgaaagcaaactaccacacctctgccagccagttaaaagcaactcatgtggctgctggacttaagatacagaggacaggtttgctgaagaggacactgtcaatcccccatcaccttaggcgttgggaatgttggctttgttctaatccagtttcccttcagaaaggtctagttgtcaagtgggatcagaaaaaggtcctggggcaactgagagtatatggttaaggttacaacttggtgttatccaaaggcccctggactaactccagttcccaactgccagttagagtgncagcactaggacctccagtctttccttttctttcttttctttctttctgtctttctttctttctttctttctctctctttctttctttttctttattttctttctctttctttctctctctctccctccctctctctctttctccacccccccacctccctccctcccttccttccttccttccttccttggctcctagatcttctttatatacaatgttaagggtgttgttgcaaaccacagagataatattactgggtagaatgagtatttggcttggtcatcaggaatgtaaattagaacaatttggtgtctgtctcttcttagaat

SEQ ID NO: 5275 - DNA, 661 bp, Homo sapiens
  LOC390827
  misc_feature [331]..[331]: Chromosome 18, SNP identification no. = rs8090942
  misc_feature [331]..[331]: allele = g, in linkage disequilibrium with rs1466882, respectively
  misc_feature [331]..[331]: n is a, t, c or g
aaggcttaccgttgatggcgatgtcaaagaacatggtgggttgaccatggctaaggcacagggctcccagtggcagctgcatctgcaaagtaaaaaaaacaaagtcttaaaacattcgaaaaattgaaatatcaagtatttccctgatcacaatggaataaaactaaaaatcaatcaagaattttggaaactatacaaacacatgaaaattaaaaactatgctcctaaattgatcagtgggccaatgaagaaattgagaaggaaattgaacattttcttgaaacaaataataatggaaacacaacatatcaaaacatatgagatatagcangagtagtactaggagggagctgtatgtgcctacatcaaaaaagaaaatcagaacatcaaataaataacctaaggatgcatcttaaagaactgggaaagcaagagcaaatcaaacttaaagctaggagaagaaaagaaataataatgatcaaaacagtaataaattactttgaaatgaagaaaacaagacaaaagatcagtgaaaaaaaaggtgaatttttgaaaagataaacaaaattgacaaatctttagccagactaattaagaaaaaaaagagagaagacccaaataaataaaatcaaagataaaaatagagatattacaactgata

SEQ ID NO: 5276 - DNA, 661 bp, Homo sapiens
  LOC390827
  misc_feature [331]..[331]: Chromosome 18, SNP identification no. = rs4797190
  misc_feature [331]..[331]: allele = a, in linkage disequilibrium with rs1466882, respectively
  misc_feature [331]..[331]: n is a, t, c or g
ttctcacttatttgtgggatttaaaattcaaaacaattgaactcatagagatagagaataaaaggatggggttaccagaggctaggaagggtagttgggggtggtggtggggtagttgagcatggttaatggataccaaaaaaagtagctagaaacaatgaataatacctagtatttgatagcaaaacaagataactatagtcaataatactttaattttacattttaaaataactaaaggagtataactggattgtttgtaacacaaagactaaatgcttaggcggatggatacccaattttccatgatgtgactattacacatttcgtncctgtgccaaaatgtctcatgtaacctataaattcatatacctgctatgtaccacaaaaattataaataaacaaatttaaaaagagagacacctgctccaagtcatggaatcaacataggtgccatggtgaatgggataaagaaaatgtgatatatatatgtatacatatatatatcctggaatactatgcagccataaaaaagattgagacatttcctttgcagcgacatagctagaggccattatcctaaattaaatagcacagaaacagcaattcaaataccacatgttctcatttataagtggaaggtaaacaatggtacacaagc

SEQ ID NO: 5277 - DNA, 661 bp, Homo sapiens
  LOC390827
  misc_feature [331]..[331]: Chromosome 18, SNP identification no. = rs4798276
  misc_feature [331]..[331]: allele = c, in linkage disequilibrium with rs1466882, respectively
  misc_feature [331]..[331]: n is a, t, c or g
caactagcaaaagctctgctgaagacactgtgccttcctagatgtaaagatatcatagaacttcccctttcaaaaattattttccagtttgtctgcccacattcatggaagtgtttaatctcactttcgttatgaacttggataaataattgattgggataatgagtgagtgctacgctcacattcctcaaagcagatttcatcatgcataccagggtcctgagagacacagatagaagcaaacatcaatttcttgtcataccctgcacactttaatgcatacctgcacactttaatgcatacctgcacagaatttctctaattcacaagncaaggaatacaccacatattgaactacagcaatgcataatgcctattacacaattaatatagtagtgcctaccccaaagaaccttttgatgttgctgacatgtccacagtgattacattcgttcctcctccatgtcagaggttacagctgtaatttcctgcttttagaagattataaattttcttatctcatactatggcaagatagtatctttttgtatcctccccaagccttgcctttatttctcaacactccaatattaatataaggattactgaggcatgtgcacataccctcatgctggtgtacagaccctttagaatctctcca

SEQ ID NO: 5278 - DNA, 661 bp, Homo sapiens
  LOC390827
  misc_feature [331]..[331]: Chromosome 18, SNP identification no. = rs1392870
  misc_feature [331]..[331]: allele = t, in linkage disequilibrium with rs1466882, respectively
  misc_feature [331]..[331]: n is a, t, c or g
atccaagcccttagaagctgacctttatttaaaatgaatttttatcagatcactgatatttatacattaaccattccgatgagtccttaattttggaacctggcttctataaaaaaaattgcttgagctattccaaaaatttaaaatacgtttttacagatcggtacaactgattcttcatgcagccattagaatatttaaactgattgtggtaaattaggtggtgtgggtttcttttagcagttaagattgatatggagagattctaaagggtctgtacaccagcatgagggtatgtgcacatgcctcagtaatccttatattaatattngagtgttgagaaataaaggcaaggcttggggaggatacaaaaagatactatcttgccatagtatgagataagaaaatttataatcttctaaaagcaggaaattacagctgtaacctctgacatggaggaggaacgaatgtaatcactgtggacatgtcagcaacatcaaaaggttctttggggtaggcactactatattaattgtgtaataggcattatgcattgctgtagttcaatatgtggtgtattccttgacttgtgaattagagaaattctgtgcaggtatgcattaaagtgtgcaggtatgcattaaagtgtgcagggtatgac

SEQ ID NO: 5279 - DNA, 661 bp, Homo sapiens
  LOC390827
  misc_feature [331]..[331]: Chromosome 18, SNP identification no. = rs1392869
  misc_feature [331]..[331]: allele = g, in linkage disequilibrium with rs1466882, respectively
  misc_feature [331]..[331]: n is a, t, c or g
ttcttaggattcattttccctctccagatccaagcccttagaagctgacctttatttaaaatgaatttttatcagatcactgatatttatacattaaccattccgatgagtccttaattttggaacctggcttctataaaaaaaattgcttgagctattccaaaaatttaaaatacgtttttacagatcggtacaactgattcttcatgcagccattagaatatttaaactgattgtggtaaattaggtggtgtgggtttcttttagcagttaagattgatatggagagattctaaagggtctgtacaccagcatgagggtatgtgcacangcctcagtaatccttatattaatattggagtgttgagaaataaaggcaaggcttggggaggatacaaaaagatactatcttgccatagtatgagataagaaaatttataatcttctaaaagcaggaaattacagctgtaacctctgacatggaggaggaacgaatgtaatcactgtggacatgtcagcaacatcaaaaggttctttggggtaggcactactatattaattgtgtaataggcattatgcattgctgtagttcaatatgtggtgtattccttgacttgtgaattagagaaattctgtgcaggtatgcattaaagtgtgcagg

SEQ ID NO: 5280 - DNA, 661 bp, Homo sapiens
  LOC390827
  misc_feature [331]..[331]: Chromosome 18, SNP identification no. = rs12455861
  misc_feature [331]..[331]: allele = g, in linkage disequilibrium with rs1466882, respectively
  misc_feature [331]..[331]: n is a, t, c or g
caatcttaactgctaaaagaaacccacaccacctaatttaccacaatcagtttaaatattctaatggctgcatgaagaatcagttgtaccgatctgtaaaaacgtattttaaatttttggaatagctcaagcaattttttttatagaagccaggttccaaaattaaggactcatcggaatggttaatgtataaatatcagtgatctgataaaaattcattttaaataaaggtcagcttctaagggcttggatctggagagggaaaatgaatcctaagaaaaaaatattaattggaaaataacatcaaattttatgaaatctggaaacttcngacaattgcatagtaaattgaccaaaaacagagcttctattttttcactaactagctaggtgacctgagtacattattttatctctccaagtcctagttaccctgacaacaaaagagaaattatgacattatttacttcataaacttgccatgaagattgaatgagctaatgtgtgttgaactacttaagtgacaagggcaaatgcattcttcgatgagttatcccatgtttctccttcccaatcctttaaaggaaaagggatttttcttttttcttttctttctttcactttgctttcttttcattgcatttctttaatttacccttta

SEQ ID NO: 5281 - DNA, 661 bp, Homo sapiens
  LOC390827
  misc_feature [331]..[331]: Chromosome 18, SNP identification no. = rs8089268
  misc_feature [331]..[331]: allele = c, in linkage disequilibrium with rs1466882, respectively
  misc_feature [331]..[331]: n is a, t, c or g
ccgccaccatgcccggctaattttttgtgtttttagtagagacggggtttcaccgtgttagccaggatggtctccatctcctaacctcgagatccacctgccttggcctccctaagtgctgggattacaggcgtgagtcaccgtgcccggcctcctcaaacattttgatataaaagaaaccacaccagaaatagaaaataggtaaaaccaaaatcagattaagaacagcttgtggtaattaacatttaacaagaaaaaaacctttgattttccatttctacctgcataaaataaagaaaggagttaaggatcatctgttccaaaaagcacnaacatccctgaaagttgtctttgagatagaaatggtgaagtaaaaaacagagctgagtagtcagagctctgaaggcttcacctgagctccaattaaagagacgtattctcaggccaggggtggtggctcatgcctgtaatgccagcactttgggaggccagggggggcagatcacctgaggtcaggagttcgagaccagcctggccaatatggcaaaaccctgtctccactaaaaatacaaaaattagctgggcatggtggcaggcacctgtaatcccagctacttgggaggctgaggcaggagaattgcttgaacccatgaggcggagg

SEQ ID NO: 5282 - DNA, 661 bp, Homo sapiens
  LOC390827
  misc_feature [331]..[331]: Chromosome 18, SNP identification no. = rs7235238
  misc_feature [331]..[331]: allele = g, in linkage disequilibrium with rs1466882, respectively
  misc_feature [331]..[331]: n is a, t, c or g
aatacagaataagcaatcatatactttagctggagaaaaaataaaaggttgattaataatttagaaagcagaaaaaattataataattaataaaccaagaacttaataattggagtgtatgaggtgaagagaggtggagcaggagacagtaaaacagaccaaacaggcctgccaggtgtggtgccacacaccttcgatcccagcactttgagaggcaaaggtggaaggatcacttaagcccaggtgcccaggaggctgcagtgagctatgttcatgccaatgtactccagcctgagtgaaagagcgagactttgtctctggaaagaaaaancaaaaacaagacagaccaaacattatcaaatctgattaaggaagaataaaatcacaacccaaacaaatatactagaaataaaagaatacacaagtgatataaaagataaatcaaaaaagtaatccagagatagtggcacttgcctacactcccagctactgaggaggctgaggtgagaggattgcttgaaccccggagtttaagttcagcctgggcaacgtagcaagatgccgtctattgaaaaaagaaaaagaaaaaatatattgtgtacatgttttcaagtgaagctagattttattctaaccagcaaactttcccaatttctatccc

SEQ ID NO: 5283 - DNA, 661 bp, Homo sapiens
  LOC390827
  misc_feature [331]..[331]: Chromosome 18, SNP identification no. = rs8095458
  misc_feature [331]..[331]: allele = t, in linkage disequilibrium with rs1466882, respectively
  misc_feature [331]..[331]: n is a, t, c or g
ctatgaactccatacaatgtctttttcccaccaaagacacctctaacgctggatcatattgtgtctggaattgtttttttctggtgggttcttggtctcgctgacttcaagaatgaagctgcggaccctcgcggtattacagctcttaaagatggcgtgtccggagtttgttccttcagatgttcagatgtgtccagagtttcttccttccagtgggttcgtggtcttgcagacttcaggaatgaagctgcagaccttcgcagtgagtgttgcatctctcaaaggtggcaccgccagagttgtttgttcctcccagtgggttcgtggcctngatgactgaagccacagaccctcatctgcagaccgttgcagtgaatgttacagctcttaaagatagtgcagacccagagtgagcgacagcaagatttattgtgaagagtgaaagaacaaaacaaccacagtgtggaaggggaccctagtgggttgccacagcaggctctatggccaaattttattcccttatttggccccacccacatcctgctgattggtccattttacagagtgctgattggtccattttacagagtgctgattggtccattttacagagtgctgactggtgccttcacaatcctttagctaggcacagagtgctgat

SEQ ID NO: 5284 - DNA, 661 bp, Homo sapiens
  LOC390827
  misc_feature [331]..[331]: Chromosome 18, SNP identification no. = rs7228058
  misc_feature [331]..[331]: allele = a, in linkage disequilibrium with rs1466882, respectively
  misc_feature [331]..[331]: n is a, t, c or g
gtataggctctattcactcattaatgttaaaaagcactacgctaattcaagctcaatacttgggagtttttattgatgtgaaaagaagtaggaaaattcatcatggagaataaattacttcaagagggatgagtagaccagaatggtgttgaaagatttgagcacccggaagacactgagtgcttagaggatgtggtggggtatggaaatggaagggaaaaaagagaagactggcttgccaattaagtgcccccatattcatttttaggcaatctcactgggggtttatcttaccaaccttgttagagtaggtagacagacaaacatgagnaggaaaggcagtctcagaggaagcaagctctggaaaccttgccccactagcaatcagaagaaaacaatgtccacatctgaacttggggttaagctcatccagccctagcaggaaatgacttcagtagggacttttcccagtagcaagcatgtgcactttgatttggctcaccctaaaagtaaccttttgctcattaaaatagtaaaaaacacacccctgggtgaagatttaaaatgctaatgagacaactgacatatgtactggcatgtacagccacagcacaagcacatctcagggaccactcaaaacatgcttgctagtaacatccct

SEQ ID NO: 5285 - DNA, 661 bp, Homo sapiens
  LOC390827
  misc_feature [331]..[331]: Chromosome 18, SNP identification no. = rs9957084
  misc_feature [331]..[331]: allele = t, in linkage disequilibrium with rs1466882, respectively
  misc_feature [331]..[331]: n is a, t, c or g
tgctgcagcagactgccgttagtgctcattgccctcaaaattacttccaccaagaaaatcacctcacccaaggtcacactccttcctggagcagcccacaaccagtggctgaagtactaaggcccacccccagcttaggacaaccctgaaggaccatccaagctccagagcttcccttgggatcagcagaggcttctactgacactgcatcacaaccctcctctctgtgcccaaacttccttccccctagcccttcatttccacagaggctgatcccaaaagaagtccaaaataaatctcatggacagtgatcacaatttctgagtttgcntgtggagaacccaaccttgatacctgccctaacaaccctgacggcagttgctagggctaagatgcactacccagctacgaggggtggtcacgtgatagctggtcttgacaggttatggctggggcctgggtgcccatacttatgcaagaactttgtagttgagagatggaaccaggggtagaagaggaggggccaggtgacaggacagccctcactgtcatctgcctccagaacatcacagagtccactttgaaggtctatttggcaagatagaaggagcatatacaaatattttatttaaaagtttgttagctcagcttataactttta

SEQ ID NO: 5286 - DNA, 661 bp, Homo sapiens
  LOC441815
  misc_feature [331]..[331]: Chromosome 18, SNP identification no. = rs13370629
  misc_feature [331]..[331]: allele = a, in linkage disequilibrium with rs177994, respectively
  misc_feature [331]..[331]: n is a, t, c or g
tttaaaattgcatctgtttagggatctctgagcttcctgtatttggacagcaaaaatgcaaatatttgattgccagaaagaaagaaaaaaaccaaaagaatataaagcttatttaatgaaacaacagctgaaaacttcccaagtctactaagacatttagacatccaaatacaaagttatacttcataagtgaaggggaaatgaagtctttcccaggtaaacaaaagctgagggaattcaccgccactagattaatcccacaagaaatgcctaagggagtcctattcctgggagtgaaaggacgatatctactaccataaaaacacacaanagcgttaatataaaacccactggtagagcaaacacacaagtaaggaatagaaaggatgcaaatgttataaccacagaaaactaccaagtgacaatgataaaacgtaagagagaaagaaaggatatacaaaacaaccagaaatcaattaataaaatgataaaaataaaccctgacatatcaataataactttgaatgtaagtgaattaaattttccatttaaaagatatagaatggctaagtgaaattttttaaatgacctaactatatgctgcctacaaagaaacatgtctcacctgtaaagacatatatagactgaaagtaaagagatg

SEQ ID NO: 5287 - DNA, 661 bp, Homo sapiens
  LOC441815
  misc_feature [331]..[331]: Chromosome 18, SNP identification no. = rs11876900
  misc_feature [331]..[331]: allele = a, in linkage disequilibrium with rs177994, respectively
  misc_feature [331]..[331]: n is a, t, c or g
aatatacattattcttatcagcacatgaaacattctccaggatagaccatatgttagcacacaagaaaagtctcaacaaatttttaaaaattgatatcaaattaaatatcttctcagactacaatggaataaaactagaaattaataacaagaggaactttggaaactgtacaaatacatggaaattaaacaacatgctcctgaatgaccaatgggtcaaagaagaaattgagaggaaaataaaaaagattactggaacagatgaaaatagaaacatgacataccaaaacctatcagatacaacaaacgcattgtgaagacaggattcacngcaataaactcctacatttaaaaagtagaaagatttcaaataaacaatttaatgatgcacctgaaataactagaaaagcaagaacaaaccaaacccaaaattaatagcaggacaaaaataatacagatcagagcagaactaaacaaaatagagactaaaatacaatatcaaaaatcagttaaatgaagagttagttttttgaaaagataaacaagatcaataaactcctaactagattaatcagaaaaaagagagaagacccaaataaaccaaactagaaacaaaaaagaagacattacaagtgataccacagaaatacaaaagatcatc

SEQ ID NO: 5288 - DNA, 661 bp, Homo sapiens
  LOC441815
  misc_feature [331]..[331]: Chromosome 18, SNP identification no. = rs1297686
  misc_feature [331]..[331]: allele = c, in linkage disequilibrium with rs177994, respectively
  misc_feature [331]..[331]: n is a, t, c or g
agatctctgtctctcaccatagatacaaaaaaataaactcaagatgaattagacttaaatgtaagacttaaaactataaaactgctagatgagtacttgggggaaacactttaagacatcggtctaggcaaagattttatggctaagacttcaaaagcacagacaacagaaccaaaaatagacaaaaaggactatattaaactaaaaagtttctgcacagcaaaggaaacaataaacagagtgaagagacaacctataaaatgggagaaaatatttgcaaattataaatcaaacaagggactaatatccagaatatacaagaaatgcaaanaactcaacagaaaataaacaaataaactcataaaaagtggccaaatgacatgaatagacatttcttaaaagaaaacattaaataaccaacaggtatatttttaaatgctcaacatcactaatcattagggaaatgcaaatcaaacaataatgagatattatcttactccagttagaatggctattattaaaaagacaaaaatgaacagttgttggtgagaaagtaaagaaaaggaaattcttatacactattggtaaatgtaaatcagtacagccactatgaaaagcagtatggaaatttctcaaaaaactaaaaatagaactacgtgat

SEQ ID NO: 5289 - DNA, 661 bp, Homo sapiens
  LOC441815
  misc_feature [331]..[331]: Chromosome 18, SNP identification no. = rs177992
  misc_feature [331]..[331]: allele = g, in linkage disequilibrium with rs177994, respectively
  misc_feature [331]..[331]: n is a, t, c or g
ttctcatacagaattgcctacctatccgtgatgtggaaaatgcactgaaattgaaggacaaaataaagcccatcagctctggagccagggataagtcacagcctctggacaccaagggcctcatccatcagataaagaagttggagcttcaggggtctgtgagttcacatacagcatccaagaacatggagggacagcaataggcccagaaagagacccctcacgtgactaccacggtctcatcacaagtgattttgatcattgtcagacatcctgtgcctttccacagaataaagcacaggctgtgttgagaagaacagaggggaattgngcctttgatcctcttgtaatctgtgtgagaaagatcatggaacacctctgtgacattcaacaatactcatgccaggtaagcaaagatgaatgacgtgcatagttcacttggaggggagacagagaggtaaatgtatttaatttcactgtgataggggttatgaaggtgttacgcatggaaactgactggaggtggctgtgcagagaagagaggctcaggagggtttcccagagaaggggacaactgggctcaattgtgactacattagctaagtgaggtgtgcattgagaggaggggaaagaaagtcaggggagggtgctctaggaaaga

SEQ ID NO: 5290 - DNA, 661 bp, Homo sapiens
  LOC441815
  misc_feature [331]..[331]: Chromosome 18, SNP identification no. = rs177994
  misc_feature [331]..[331]: allele = a, g
  misc_feature [331]..[331]: n is a, t, c or g
ttttcctgagaattaaaaaaataccttaggtgatatggaataaaggtttttgtttttcattgtcttttagcataaggccaacttttaacaggaagtcaattatacaaacaaatatttacaaaatatttcctaaagcacatgccaatcatacaatcatataatctacagcccctgacctcagatcaagagagaccacaggagagcagcagaattggtctgaattgcttaaatctattttgaaattgtattttgaattgtattttactgttatgtattaagcttgagttaagagatagcatttttcatacatttgctgtcatatttgctttanggatgttattgaggtcttgtccattacatcagacaatgcctccattaagggatctcaagagacacatttttctcatatcttattgctaaaaaatgttctgcttctactttatcagagagtgtgagttttaaaaatcttattggcaatgaaaactaggtaactcaactcatcttctttttattgtccactaggaaattagagcataagtgagaggttcctttgccaccatgtcgcactttacgtcacacatatttgtgtcctacatttttatctggccttttcttattctatccttattttctctttctcctgacttcctgacatatacac

SEQ ID NO: 5291 - DNA, 661 bp, Homo sapiens
  LOC441815
  misc_feature [331]..[331]: Chromosome 18, SNP identification no. = rs177995
  misc_feature [331]..[331]: allele = g, in linkage disequilibrium with rs177994, respectively
  misc_feature [331]..[331]: n is a, t, c or g
gtaatttttatcacatttttggaatgagaaatcacctattgtgtaggtgatttgggcagggagaccagttagaaacagtggcaatgggacaggcaatgccaccctgggctaggaccacgggtattcatgtggggagaaggaaatggaaccaagaaatatttataaggcagatacatctcaaattaatgctggattagttgtgatggaaagaaaagtgacttccaggtttcaagcctaggctgtaggttttccaactggggcagggagtagtttgggaggaaatatgagacctccatttttgggcatgctgatttgaaggaaactgtctagnacagccaggtggagatacccaagctttgcctaccactccattagtttccactgatgctcattcacttccattatttttttctgcttggagtatagccaccttagcttctagcactgaccaaacttgagtcatctttctgggcccagttgaggtcctacacttccaagaggccttgtagcccacttttcttctgacctccaacagcacttgctatctgcattatctttagagcaaagacttgaagccctttatgttgctatctacttgttttatctcataggtgaaattcacctacttattcattcagtgaatatttagtgtaagcatcca

SEQ ID NO: 5292 - DNA, 661 bp, Homo sapiens
  LOC441815
  misc_feature [331]..[331]: Chromosome 18, SNP identification no. = rs177996
  misc_feature [331]..[331]: allele = g, in linkage disequilibrium with rs177994, respectively
  misc_feature [331]..[331]: n is a, t, c or g
ggtgatgggcacacagatgactcagacatggtctcggctcttaaagagttgactatccactggaagaggagatgatgcaacatgagcaagttactctgtgcccttgaaggaacacaaggttcgttctcttctttattgtttactctcatggtggcttgctcaggctgcatgcagagccaagcctcaacgaacagcatatcaattctatccattctagcttccagactatccattctagcttccagaagagaaattccatagcaaaccctgggggatgaaatctgatctctctctgagccatccaaattcactttatacacagtgtgagtcntgacagtgtataatgcctgtccctaaaatgtggctttcgtctgtgtggccatgtttctcctgctgtgctcacaccccaaaagaggcaaaatcttataagaagctccaatatagtggcaatgttttgcttttctagagtggacttgatttttcacagcagttatgaggcatctcagtcatggcaggcaaagacccttttcactcagaaacataaggcatgagaaggaacttgacagcattgtggaaagcagtgagctgtcagtcggaaaggataatcagttaccttctgggatctgccctcaactaactgctttgacttgggtaagccagt

SEQ ID NO: 5293 - DNA, 661 bp, Homo sapiens
  LOC441815
  misc_feature [331]..[331]: Chromosome 18, SNP identification no. = rs177997
  misc_feature [331]..[331]: allele = t, in linkage disequilibrium with rs177994, respectively
  misc_feature [331]..[331]: n is a, t, c or g
atgttgtcttaaagacacttttttcaacacatgagaatgatttattgagaaggagttaagatgtgactgagttgggtgacaactttgggttgttgccccagagctcaagggtgtgcctgtgagagtcctcaactggcatgatggagaaagctttggctgtcagatggaagacatcagtcttggccctagaacttgctactgatgagactcaggacaaggtctgagactctctagactccagtctctttccttacaaaataatgcttgatctagattcttttcaatcttctctccagctctagcagtcgactatctcttgtaaactatgtangtaagagtggttatgtgtgtgatttgtgagcaacactttgtttaaagttgcaagctctcttagttttcacaataataacaatgtctgacagtttctcattctgcaaacaacagcttcttggtttgtttagtgcaacacagaattgtgaaaagctcacaggctttgaaagcagagatacccaggcccaagtctaccactgactgtcacgtcttaactgtgtggttcttagcatgtcacttttaatgtcaaagtcttatttacctcctccataaattggacattctcatatcatgggtgtgtgttcttttttgttgtgataagtgattggca

SEQ ID NO: 5294 - DNA, 661 bp, Homo sapiens
  LOC441815
  misc_feature [331]..[331]: Chromosome 18, SNP identification no. = rs178000
  misc_feature [331]..[331]: allele = t, in linkage disequilibrium with rs177994, respectively
  misc_feature [331]..[331]: n is a, t, c or g
gggattacaggcatgagccaccatccccagtgagtaacaacttcttggtgttggagaaaaacaaatacacaaactctgtgggctcactttcttcatttataaaattaaggatgccccagatgattcctaaggcctctctataattttttgtctggctcataaactggatctggatataattccaaagtaattcaagtaaatacattccagaatggggttttaagtaataacagcatcattgcaataaatttaagcatgattactttagaggacaatactcttttagatgtgtgattcaagtcaggttattttaatattaataatatgtatntaatgcctaccttgctacagtccagcaagtgtttttgttacattttgtagccacaccttagacctgtgggaagaacaggaaagaacagcaggaagagatggagacaatatgaggtagaaggtcaggataaaagcaaggtgacctggcaaggctggctctgtcttccccctggttggacaatgacttgcttgcattgtgtgccttactttactcaataaatatattcctgaaagtagcttcaaaacatttgcagattgaatcatgttttcggtgtaacacaggcatgttctattgaaaccactcccatggtaaaactttttgtaaaaagag

SEQ ID NO: 5295 - DNA, 661 bp, Homo sapiens
  LOC441815
  misc_feature [331]..[331]: Chromosome 18, SNP identification no. = rs929581
  misc_feature [331]..[331]: allele = t, in linkage disequilibrium with rs177994, respectively
  misc_feature [331]..[331]: n is a, t, c or g
gctgactgcatttggaagagcagttgaattaggaatggcttgcaaaaatgttagtagggatggaagagagtgttggagacgaggagtgattaatattcaaaattcaggtttgtgttcaattttgaagtcactgttttagttttgatatcaatgtaaggagtgtaagacctgtgtaaatgggatatcaggttaaaaaatccagcctgctccatcctgaggagagcacaaatacatgggactcacagataattcaaatgttgacttcactactccagctgtcaaagcagttctgagcgagaacaagactgtttgtaggaactctagttctttngcattacctgtcttcctggaggtagaatcatcaggaagaagaaaccaagaggagcagaatcagatgggtgaagtaacccgtgcattatgtaaacaatctttggcccataacctagggtgagccaacatattaatatttaactactaactcacaggatcaaccaatcagatttggccctggacatagccccaatcagccctggagataacattcccatggcaacactaatgcattcttcactgaatggttggcaacactaatgcacttactcatttaagattctttgtttaatgtatgtcttcccctccagactgtaagcctattgaaggg

SEQ ID NO: 5296 - DNA, 661 bp, Homo sapiens
  LOC441815
  misc_feature [331]..[331]: Chromosome 18, SNP identification no. = rs16967814
  misc_feature [331]..[331]: allele = c, in linkage disequilibrium with rs177994, respectively
  misc_feature [331]..[331]: n is a, t, c or g
gactcctttgctatgaaatgacaggattggatttgatgatctctgaggccgatttcagctctaatactcagtggttcagcacacccataaagtgcacagcagaggtttgtttgtgaccaaaacagaatgttaggaactgaaaaaactgccaaagaccactttagaggaaaagtggaaacaaggttttgtgtgaaatatgcttggcttgcacaatgcaagtgattcttttgtgagagcggaaggccatagggtgtgattactttatctgccactaagcttcctgggcagcccaggccaagctaaagatacctatcactcttgttcaaggtcngtttcctactgagttgtcacactgttgaattattgttgagttgaagtccaaaaggggaaatattttgcaatctagagttggaccctggagctatacaactatgattactgatacagattttcccagaaaatctcagtgcaccgaggtcataccaaggagccctcatacttctgtatgctactgtcagcttactctgctggtggtgctgaagttccgtgaacattttccccaatgagcaagtaaaaacatttcattttgcctcttcctgaaccatttttttaaaagtttttatatggaataaatctttacattaaaaaagatacacaatag

SEQ ID NO: 5297 - DNA, 661 bp, Homo sapiens
  LOC441815
  misc_feature [331]..[331]: Chromosome 18, SNP identification no. = rs178004
  misc_feature [331]..[331]: allele = t, in linkage disequilibrium with rs177994, respectively
  misc_feature [331]..[331]: n is a, t, c or g
accagccttgtgtacagcatgcttagctctttgatttctgagccctcagctatcacaagtagtcaattctcaggagaggctgagttgggagatggacctaatgacattgcctagcacacagtaggcactcaaagcatattagatgaatgacagaatgatcaaacagcatcaaaaaggcacagctaactagaagagggggcccaggaaaacaaataagtaaaattgatgctttcgtgcctgggccctttaggacaaggaaaagaactcaggattgcaaactgctagtctgaactagggacttgacatttattatctgagtcactcatgtagncatcctgggaggtattaggaacacccttttacagatgcagaggtggaagcctggagaagggaagtggttccccccaggtcctccatccagtaaggggcaaggcctcagtcccaacaaagctctacctctgttgcagctcatagctcagtttcctcaactacagaaaggatgcagcgttgcttatcaaatggggtggtttcgaaagcagcatatttaaactctggattaggaccccattaaacttgaatctggatcagatctagggagaagtttacttttgtgctattcataaaagaaaaggtttagaaagccaagaaccgtgtaaaccac

SEQ ID NO: 5298 - DNA, 661 bp, Homo sapiens
  LOC441815
  misc_feature [331]..[331]: Chromosome 18, SNP identification no. = rs12958298
  misc_feature [331]..[331]: allele = g, in linkage disequilibrium with rs177994, respectively
  misc_feature [331]..[331]: n is a, t, c or g
tcagtgggaagatatctcagtcttcccatggacaggaaagattcttaagagagattagagattctttaataacagatgaaaacagaatcagggaaatacagttgttaatgtagagttgtcaaatttagcaagtaaaaatagagaacatctagttaaatttgaattgcagagaaacaacaagtaattttgtaatataagcatgtcctacttactttactatgagtatacttatactaaaaaagtacttgttgtttctctgaaattcaaatataactggatgttctgtattttatctggcaatcctatgtaatgtgtctccatttacctcccnagctactgaggcctggagaaaagagttacgcataacacagaaataactggaaatgtcaccatcactggaatgccttcccagcaacttgcatcatgtattcagtactatatgaccttgaacatgtttgtctcttgcacttgagtttctcttattgcaaaacagaattctcactagagataagaagagccagcaagcatatgtaaggcctctttacacagtattgtatgtatcatatgctcactaattttcaaaagaaattgtactatgattttggagtttctttacactcccttgacagttttagaatcagccttctcattttttccccat

SEQ ID NO: 5299 - DNA, 661 bp, Homo sapiens
  LOC441815
  misc_feature [331]..[331]: Chromosome 18, SNP identification no. = rs764359
  misc_feature [331]..[331]: allele = a, in linkage disequilibrium with rs177994, respectively
  misc_feature [331]..[331]: n is a, t, c or g
aaggtgggataccattcttggatatacagtgatgctatttaataaatcaatggattttacaaagtaggcacaggacactttccggtttcaacttgtggaggtcaagatctccactgaattcggttatagaacctgatataccaagagcacttttcacagcttgcttcaatgtgactgcttggtttacctagcatcttctaccacctgggtcatgggctatgtctagataaccaacccctaccacagctgaatggcatggatgtaggtacactcagagtctgatggatattctggcctcccttaggggagaaggaagaatatcggtcaactngttgagaaattttttaccagatttgaagaacaatgagagtaccccaacccacccacatccaaacagagtatatatcaattacagaataaatcaggactacatctcagtcctccaagcctgctagtcagttctcagtttcctacccttaaaaaaagacaaaatggatggggaaaaaatgagaaggctgattctaaaactgtcaagggagtgtaaagaaactccaaaatcatagtacaatttcttttgaaaattagtgagcatatgatacatacaatactgtgtaaagaggccttacatatgcttgctggctcttcttatctctagtgagaa

SEQ ID NO: 5300 - DNA, 661 bp, Homo sapiens
  LOC441815
  misc_feature [331]..[331]: Chromosome 18, SNP identification no. = rs764358
  misc_feature [331]..[331]: allele = a, in linkage disequilibrium with rs177994, respectively
  misc_feature [331]..[331]: n is a, t, c or g
agagtcatgagcaacttatgaatctttgaacatatgcgtttaatggagaaggtgggataccattcttggatatacagtgatgctatttaataaatcaatggattttacaaagtaggcacaggacactttccggtttcaacttgtggaggtcaagatctccactgaattcggttatagaacctgatataccaagagcacttttcacagcttgcttcaatgtgactgcttggtttacctagcatcttctaccacctgggtcatgggctatgtctagataaccaacccctaccacagctgaatggcatggatgtaggtacactcagagtctganggatattctggcctcccttaggggagaaggaagaatatcggtcaacttgttgagaaattttttaccagatttgaagaacaatgagagtaccccaacccacccacatccaaacagagtatatatcaattacagaataaatcaggactacatctcagtcctccaagcctgctagtcagttctcagtttcctacccttaaaaaaagacaaaatggatggggaaaaaatgagaaggctgattctaaaactgtcaagggagtgtaaagaaactccaaaatcatagtacaatttcttttgaaaattagtgagcatatgatacatacaatactgtgt

SEQ ID NO: 5301 - DNA, 661 bp, Homo sapiens
  LOC441815
  misc_feature [331]..[331]: Chromosome 18, SNP identification no. = rs2110136
  misc_feature [331]..[331]: allele = a, in linkage disequilibrium with rs177994, respectively
  misc_feature [331]..[331]: n is a, t, c or g
aagatgtgggctggatgaggagccaaggtactgtatactaatgctaggactgtcctaggccccaggaaataagaagaggaactcggccaacaacggggcagccctgaatggagctcacggtttagcaaaggaggctgatttaagggagtaggcctacactgtgacttcctggcagtgctgaccttggaattgcccaagaatcagagatagccttaaaattgtgacaaggcaatgagggagaagtacaaggcccagaggaaaatgggttggtcgatgtttggtggcataaggactcccacaacatccatctgcagaacctcagaggagtcantaggaacccttagaattaatcacaggaatgagtgttgccattttccaggtctctatgatatgcttgtggccaggcacttcccatacatcatctcacttaaaataagggtcagacacttgacactccacttttgaaaggttgatgacccataattagagtgtgcgggaggggtccctacttaaagtttggatacagaacatgctttcattcacaagaaaagaatgagaatcaggatttcaagtgtgctaatgccttattaaattgtcctaataatccattgtttatatgcagagatgtgataactgactgacagactctcaggaccatata

SEQ ID NO: 5302 - DNA, 661 bp, Homo sapiens
  LOC441815
  misc_feature [331]..[331]: Chromosome 18, SNP identification no. = rs178010
  misc_feature [331]..[331]: allele = a, in linkage disequilibrium with rs177994, respectively
  misc_feature [331]..[331]: n is a, t, c or g
tgactgggacatagacttaaaatgggaatgcttaggaaatggaatgttctttaaccagtattgtttcatctgctattattggggaaaaagaaatctctctacagatttcaaacccactttgctggtgcaatggaatgatcaaatagactctctctttgaagatctggcatcttgtccagcctcagagtcattatttagattatcatttgggtcatcggtgacctcagtgctgtggaccctgggagaaggactgaggattagagccagaagacgtgggtttcaggattggctctacttagtagctgggagattctaggcaaattgctttttnaaaaaaattcaaaattctctaaatctgtttcctcctctgaagagtgagaataagacgcaaacctacctacttctcaggattatgtgaagattacaaaaatcctctgtgaaagcatttccatcaacctcaaactctccacaactctaagagctggaggcacctgaaaccaggctgaatctgtacaaatgggacaggtgggttctaaaagttcatttataaaagaaacctcccaagtgagtctaacttgttctttatctctttgtcctgtaaggggccactggaaaaaaatgagtcaaagttttccattcaagtgaattttcagatagttgt

SEQ ID NO: 5303 - DNA, 661 bp, Homo sapiens
  LOC441815
  misc_feature [331]..[331]: Chromosome 18, SNP identification no. = rs178013
  misc_feature [331]..[331]: allele = g, in linkage disequilibrium with rs177994, respectively
  misc_feature [331]..[331]: n is a, t, c or g
ctggccctgacttttaccacccctttaatttcagaaagccattcagggccttgcgcggtggctgacacccgtaatcccagcactttggaaggccgaggcgggtggatcatttgaggtcaggagtttgagaccagcctgaccaacacggtgaaaccccgtctctactaaaatacaaaaaattaggcgggtgtggtggcacacacttgtaatcccagtactcaggaggctgaggtgggaggatcgctggagtccaggacacagaggttgcagtgagccaaaatcgggccattgcactccagcctgggcaacagagggagaccatgtccccccnaaaaaaagccattcggcaatgaggccctcattgttagacaagaataattaatgaggtgtcatcgagttgttgaaaagactacatgcagtaagtctgtctggtgcttcatgagtacctactacatggtagccattgttttaataaatagggaggtgtttctattaaaaacagaacttggccaggggcagtggctcacacttgtaatcccagagctttgggaggccaaggtgggtagattgcttgagcccaggagtttgagaccagcctggacaacatagtgagaccctgtctctacaaaaaatttaaaaaattagctgggcatggtgatac

SEQ ID NO: 5304 - DNA, 661 bp, Homo sapiens
  LOC441815
  misc_feature [331]..[331]: Chromosome 18, SNP identification no. = rs178014
  misc_feature [331]..[331]: allele = c, in linkage disequilibrium with rs177994, respectively
  misc_feature [331]..[331]: n is a, t, c or g
taaaaaattagctgggcatggtgatacatatctatagtcctggctactcaggaggttgagatgagaggaaaacttgtggccaggaggttgaggctgcagtgagcagtgattgcaccactgcactctggcctgggtgacagaggagactttgtctcaaaaacaacaacaacaacaacaaaaaaacaggacttaagatgagtcttcaaccagtctcaggggactgcaacttttctgtgtaaacaatgcctaactgtgtaagaattgtcgtatagaattaattgcccatcctcttcctctgtctccacatcaaagcatctgagatttctgcttnacccccaataagaccggtccgctgtcaggttctctcaaaatcttctttcttcaaatttgaatttcacatcattatttactactccacccttttctaacatctgctaattcttcctttcaattcccctacctttgcagggtagttttttttccccccagggaaattcacattctcctgttaataattcataaatgttgccagacacagatgaatgaaaccatttcccattcatgtcctgctttccagggatgctgtgagaattagttagatgacatctgcaattcacagcccgctctaagagaaacatgatatattcacatcacatttaac

SEQ ID NO: 5305 - DNA, 661 bp, Homo sapiens
  LOC441815
  misc_feature [331]..[331]: Chromosome 18, SNP identification no. = rs519254
  misc_feature [331]..[331]: allele = g, in linkage disequilibrium with rs177994, respectively
  misc_feature [331]..[331]: n is a, t, c or g
ccctatcagaaaaaaaatttgacaagatagactaggattaaaattcatggatggctttagaactcagaaataaatcaggaagaaaaaaaatatatgtgcaagccaattccataaatactagaacctcgtagaatcattaaaagtccccataacttgggcctgagtgcaactgtggtcccttcactgtagtaatttaaactcgactgtttattttggcttctgccttctcaatgacttgttctaatcgaaatgctttgatgagatgcacaaaaggaataaaaatatgattgaaaagccagagagtaatatcttggtttaaaacaactgtgancacaaactttaatctttggcattgccataagggctatcttagactaactggggcaaacacttttaggatcttgtttggaaaaacatttttggttttagagtgggtgtccatgtatcataacacaacacttacaaaacataattttttaaaaaagcctcttattctgcctacaatccatgtgcttttgacatcataagctccatttcttgaaggcttctataaaaatccatggcttatggaaggtaaaggcaacattatgctgagttcaagcaatatttgtgggacttgggttccactttttctataaagagccaatgtgtttttctcctg

SEQ ID NO: 5306 - DNA, 661 bp, Homo sapiens
  LOC441815
  misc_feature [331]..[331]: Chromosome 18, SNP identification no. = rs577725
  misc_feature [331]..[331]: allele = a, in linkage disequilibrium with rs177994, respectively
  misc_feature [331]..[331]: n is a, t, c or g
gggcgcctgtagtaccagctactcgggaggctgaggcaggagaatggtgtgaacccgggagatggagcttgcagtgagccaagatggcgccactgcactccagcctgggcgacagagcgagactgtgtctcaaaaaataaataaataattgaggcaaactcatcttcactttacacctcaaaaagtgtaagtcaaaatataaagaggaaatttttaactccagacctctcagatctcattgatttttctcttgttcaaaggcaagcaaaaaaagtattgagcaatacacacaacaatgatgacaactacaatgacgtgacaagggtgatcntagcagctaacatttactgaggacaaacacagtcctttttgccttttaaaggaaagtcctttaagtgcattctcccatttgatctatcaacaactctacaaatggtagctgtgtgtgctttaaaacaagctgaaaatttttttagaaaaaaaacacacattgggaatttctacatgtaagaaaggataaaatcagtcttgatttcatgagaggactcaccagttcagattattattgtcactctaaatgtagttttgctgacataaatactatctgggtaccctaggggctgctgacatccacatttggaattgttgcatcttccggaac

SEQ ID NO: 5307 - DNA, 661 bp, Homo sapiens
  LOC441815
  misc_feature [331]..[331]: Chromosome 18, SNP identification no. = rs9960559
  misc_feature [331]..[331]: allele = t, in linkage disequilibrium with rs177994, respectively
  misc_feature [331]..[331]: n is a, t, c or g
caatgattagatcttaatattgaatgcacaaaccacactcactgtgtgaactttctgagagagctccccacctaaagacagaagaagtgaagaagttttattggaaggattgtcaaaggcggggggcggggaacactttgagtctctttgagccagttgattaggggtgagttgattttcttatgaacactctaaatctactctccctgggggcagggaaacctgagaagcttggatttcaatgatttaattccccttctaagaatagccaaaactggggtggagagaagctaatgaagtcaaccacagaaagaacatttgcaaattgagnaaagccctgtgaatcttaggtaatagctgggagccgagtttctttcttccacatctcataaactacaaaataactcagcaaaacatgtcaaccaatggatgctctccacaggttacatgatctaaagctgagatacaagaagccaaacacaattaaaacgtgcttccattggtaggttcatggtgatgctttgcagaggtatcacctaacctaccaagctttggacatgctttattcattacaacactgtcaagattaagttgccacgacttcatatcccagttcatgaattgcatctacatacaccatataatgagcctcaccagtgta

SEQ ID NO: 5308 - DNA, 661 bp, Homo sapiens
  LOC441815
  misc_feature [331]..[331]: Chromosome 18, SNP identification no. = rs515674
  misc_feature [331]..[331]: allele = c, in linkage disequilibrium with rs177994, respectively
  misc_feature [331]..[331]: n is a, t, c or g
attaggggtgagttgattttcttatgaacactctaaatctactctccctgggggcagggaaacctgagaagcttggatttcaatgatttaattccccttctaagaatagccaaaactggggtggagagaagctaatgaagtcaaccacagaaagaacatttgcaaattgagcaaagccctgtgaatcttaggtaatagctgggagccgagtttctttcttccacatctcataaactacaaaataactcagcaaaacatgtcaaccaatggatgctctccacaggttacatgatctaaagctgagatacaagaagccaaacacaattaaaangtgcttccattggtaggttcatggtgatgctttgcagaggtatcacctaacctaccaagctttggacatgctttattcattacaacactgtcaagattaagttgccacgacttcatatcccagttcatgaattgcatctacatacaccatataatgagcctcaccagtgtacggaatgtggacaggtcttcccttaatgctgggattaattagttagtctctggatgtgcccttgaggtttagcgattcacttcactccccagtgcagtgaatccaaaaagtacaagatcctttctccaaggaggagatgcaaattcacagatagcctga

SEQ ID NO: 5309 - DNA, 661 bp, Homo sapiens
  LOC441815
  misc_feature [331]..[331]: Chromosome 18, SNP identification no. = rs518217
  misc_feature [331]..[331]: allele = c, in linkage disequilibrium with rs177994, respectively
  misc_feature [331]..[331]: n is a, t, c or g
aactacaaaataactcagcaaaacatgtcaaccaatggatgctctccacaggttacatgatctaaagctgagatacaagaagccaaacacaattaaaacgtgcttccattggtaggttcatggtgatgctttgcagaggtatcacctaacctaccaagctttggacatgctttattcattacaacactgtcaagattaagttgccacgacttcatatcccagttcatgaattgcatctacatacaccatataatgagcctcaccagtgtacggaatgtggacaggtcttcccttaatgctgggattaattagttagtctctggatgtgccnttgaggtttagcgattcacttcactccccagtgcagtgaatccaaaaagtacaagatcctttctccaaggaggagatgcaaattcacagatagcctgaagcctaaccttgggttagcccctgagatcgacccagttccttcttacagcaggatctccttgtgatggcttggcaggattgactgagctagtgcttccttccaatgtttgattggttaaataaagatatctttcaatgtttatataatagcattcagaacatagtctccagggtaactagtgagtagaaatggcaacatgtatgagtcggaatattaaaaaggaaatacaca

SEQ ID NO: 5310 - DNA, 661 bp, Homo sapiens
  LOC441815
  misc_feature [331]..[331]: Chromosome 18, SNP identification no. = rs542228
  misc_feature [331]..[331]: allele = g, in linkage disequilibrium with rs177994, respectively
  misc_feature [331]..[331]: n is a, t, c or g
cactccccagtgcagtgaatccaaaaagtacaagatcctttctccaaggaggagatgcaaattcacagatagcctgaagcctaaccttgggttagcccctgagatcgacccagttccttcttacagcaggatctccttgtgatggcttggcaggattgactgagctagtgcttccttccaatgtttgattggttaaataaagatatctttcaatgtttatataatagcattcagaacatagtctccagggtaactagtgagtagaaatggcaacatgtatgagtcggaatattaaaaaggaaatacacaaatcagtctttcatttcaaggntacatttgatgttgcatatcaatatcattttacatttgagggtgagcccaccctatgttccctgtgagctgtgagcaagagacaataatcacacccaatcccagtggaggctacaggtgagggggaggagcaaaaaccatataaaccggtcttttccattctgttaggaataagatgacatgaacagcttttcctgccacagtatctcaccaacagattagtttttaaagggaggttaaatctgtttgaaccttggcaaatttgttactataaccgtagcatagttgtacgtgaaaaccaaatattattgtcctttattattctgctttg

SEQ ID NO: 5311 - DNA, 661 bp, Homo sapiens
  misc_feature [331]..[331]: Chromosome 18, SNP identification no. = rs12965979
  misc_feature [331]..[331]: allele = a, in linkage disequilibrium with rs930189, respectively
  misc_feature [331]..[331]: n is a, t, c or g
caaatccaggtttcttgtgctttctgtgttagaaaggtttaagaggaaccaccttttctgtcttttatttgtggccctcggcagctttgccactgggtcaaagtctttgtgcctagttcctttttctcctcacataaatttccttccaagagcccatttagctttcatgcaaatgtcttctgacatgtcctcaaatccagctgttgggtaggcatgggcatgtaggaatctcatcttaaactgggatcttgccaccatcagaattaaagagaagtaactggactagtggtgacactaaagtttaaggttaaatagggattttcctcaccantaagattatccaaattatcactctctgtcggtcttattacctgatctggtcaactttgtgtttggaagcagtctctgacaaagaggaaattgtacccaaacaactttttttaatacttcacacttgatctgccagacatgggagtagtttgaaactggttatatttccagtttggacccaataaaaagctggttcactgataatttctaaggcaagggaagatggtgtattagaagagactgggatacggaaggagggagaggttgaagttgaagagctgcaataaaatactgcagaatgtttgtgtcactggaagcctcatcctgagtt

SEQ ID NO: 5312 - DNA, 661 bp, Homo sapiens
  misc_feature [331]..[331]: Chromosome 18, SNP identification no. = rs1560571
  misc_feature [331]..[331]: allele = g, in linkage disequilibrium with rs930189, respectively
  misc_feature [331]..[331]: n is a, t, c or g
gggtttgagctctaacagctctcccaagagtgttattatttttccccctttaaactgaagggtgctaattaatgtaggaaaagttatatgccaagtttgctttgcctgtggtttccttagattaaaggctactggcaactccagctctgtcagaagggctggtgctgtattcttatcccctgaaggaggcttcagctctgctgactcaagaagacttcagcttttgatttcgagttattggatattgacccatcactcacagcagagttatgggcctgctgccctggatccagggaactgggcccaggccctgcttatagcacctcccagncctccctttcagtttctgttgaacctaagcctgtaaatgtcaatttcattttgtaaaggccaggcagttgtcagttcttccaggggattcagggagaaggaactcaggatgaggcttccagtgacacaaacattctgcagtattttattgcagctcttcaacttcaacctctccctccttccgtatcccagtctcttctaatacaccatcttcccttgccttagaaattatcagtgaaccagctttttattgggtccaaactggaaatataaccagtttcaaactactcccatgtctggcagatcaagtgtgaagtattaaaaaaagttg

SEQ ID NO: 5313 - DNA, 661 bp, Homo sapiens
  misc_feature [331]..[331]: Chromosome 18, SNP identification no. = rs4890369
  misc_feature [331]..[331]: allele = c, in linkage disequilibrium with rs930189, respectively
  misc_feature [331]..[331]: n is a, t, c or g
ccagtttggacccaataaaaagctggttcactgataatttctaaggcaagggaagatggtgtattagaagagactgggatacggaaggagggagaggttgaagttgaagagctgcaataaaatactgcagaatgtttgtgtcactggaagcctcatcctgagttccttctccctgaatcccctggaagaactgacaactgcctggcctttacaaaatgaaattgacatttacaggcttaggttcaacagaaactgaaagggaggtctgggaggtgctataagcagggcctgggcccagttccctggatccagggcagcaggcccataactntgctgtgagtgatgggtcaatatccaataactcgaaatcaaaagctgaagtcttcttgagtcagcagagctgaagcctccttcaggggataagaatacagcaccagcccttctgacagagctggagttgccagtagcctttaatctaaggaaaccacaggcaaagcaaacttggcatataacttttcctacattaattagcacccttcagtttaaagggggaaaaataataacactcttgggagagctgttagagctcaaacccaactcattcggattctgcacacaaagactctggggagggggacgatggggtggagaacagaacaca

SEQ ID NO: 5314 - DNA, 661 bp, Homo sapiens
  misc_feature [331]..[331]: Chromosome 18, SNP identification no. = rs6507446
  misc_feature [331]..[331]: allele = t, in linkage disequilibrium with rs930189, respectively
  misc_feature [331]..[331]: n is a, t, c or g
tgctataagcagggcctgggcccagttccctggatccagggcagcaggcccataactctgctgtgagtgatgggtcaatatccaataactcgaaatcaaaagctgaagtcttcttgagtcagcagagctgaagcctccttcaggggataagaatacagcaccagcccttctgacagagctggagttgccagtagcctttaatctaaggaaaccacaggcaaagcaaacttggcatataacttttcctacattaattagcacccttcagtttaaagggggaaaaataataacactcttgggagagctgttagagctcaaacccaactcattnggattctgcacacaaagactctggggagggggacgatggggtggagaacagaacacagtcttggagagggaaaagagattattttcaggtcaactgaacagtagctttcagaagcaggccattgtttgaattgtgtttcatgatattgattatgaaccgtcctccgccattctttgcctttttggtcaggctctgcctgtcctactggaaatgggaggcagtgtgtcctggagctgtgctgtgtttttttcttaaatgtgacgagcccgttgggaggacaaagtcttatatggtctgaaaatatatttttaataggtcattgtctagtta

SEQ ID NO: 5315 - DNA, 661 bp, Homo sapiens
  misc_feature [331]..[331]: Chromosome 18, SNP identification no. = rs12454443
  misc_feature [331]..[331]: allele = g, in linkage disequilibrium with rs930189, respectively
  misc_feature [331]..[331]: n is a, t, c or g
gattatgaaccgtcctccgccattctttgcctttttggtcaggctctgcctgtcctactggaaatgggaggcagtgtgtcctggagctgtgctgtgtttttttcttaaatgtgacgagcccgttgggaggacaaagtcttatatggtctgaaaatatatttttaataggtcattgtctagttaaggggaattagctaaatatgtgtatctctgcagactagaaatcaaaagcaaatcagagtgaacaaaatgatagaacaatatgaattgtgtactagttatatgaatgttaaagacttataaaacaaatgattttcaaaactagctgagnatacacacacatcaaactcacaaatgtgattccctctgtcaaggaagacaaaggactagaattgaaactggaatcaaagatgaaagtaagctttttcttattattctaattttcgtttttaaaaagaagaatcaaaattcacaaatcacttatataatgatttttttaaaaaaagatagaaatcaatgtatccttctgttttgctttttttctttccaaaattacaaagaggagttggcatgaggtacttattgtttcaatccacttcacatctgtatatgacattcaagaactgttcttcgataaaacatacaggctcttgattctgag

SEQ ID NO: 5316 - DNA, 661 bp, Homo sapiens
  misc_feature [331]..[331]: Chromosome 18, SNP identification no. = rs1025441
  misc_feature [331]..[331]: allele = g, in linkage disequilibrium with rs930189, respectively
  misc_feature [331]..[331]: n is a, t, c or g
ttgtgggatgtgaaaaaaagtttatgtcttaaactatagaattactcaaggactttataattgagcaggtgggttgaaggatgaggcacaggaaatgaaacagcaatgaatcacatagcctataactgtagctcatattgacagaataaagacttatggaaacacaattaccagatacactgaaaagaattatagaaaagagcctatggagagggagcttaataaatgtttgttaaatgaatgaatggatagatggattgacagtttagaatgggaaggtttgaactctagtccttactactatggatatgatttagaagaagttactganggttttggggcctcatttttttttttttgtttgcaaaatgggtaaaataatgctgaccttagtacattttagagtgtatgatgataatgaaataaaataaaataatggatgtaaacatactttgtaactggagaataatatataattttaaattgttgttttcatttttgaatgtctgcagcattcaaaaatattttaaaattattgttttgaaatatgctgcttgtgaataaaggtaaacgtaaaacacaaaaataaaaggaagttgagccctggtggatggacacaggccaatgggcttcttggctgagggtggacttgaagaagaag

SEQ ID NO: 5317 - DNA, 661 bp, Homo sapiens
  misc_feature [331]..[331]: Chromosome 18, SNP identification no. = rs930189
  misc_feature [331]..[331]: allele = t, c
  misc_feature [331]..[331]: n is a, t, c or g
ataactggcatagatgaaaaaaataagcttaaatagacagcttcctaatgccaagtgggtgttcatctgttggtaaagtagcagatcagatgttaattacagcagaggagtgctcagctagcaagggacagtcatatttccttcaatcatcttcaatatttgtacatttcccaacatttgtgtgttttttcctcacttatgctgttaggggactgtgtgatatggggctggcaccaggcaagtaagaatgcctggagttgatggcctttactagcactgttaccctttgcaactaacataatttctctcagcccagattttctctttcatntacaaataatgtgggcctatttacctcgaagggtagttgtaaagatgataatagaaatagctaacatttattgagggttttctctgtgccagatactgtgttaagtgctttacatgaattatcacatttaatcttccctagaaccctattatcattgttgttcaaattaagaaattgagccttggtgagattaagcaaatcgccggaggtcacacagctggaatgtggtagagccaggatttaaatttagaatgtctgattcagaactcaagcatatcactgccatgctggactataaagtttgaaatgagataacatataaactgtaaa

SEQ ID NO: 5318 - DNA, 661 bp, Homo sapiens
  misc_feature [331]..[331]: Chromosome 18, SNP identification no. = rs2334940
  misc_feature [331]..[331]: allele = g, in linkage disequilibrium with rs930189, respectively
  misc_feature [331]..[331]: n is a, t, c or g
cccaggttcaagcaattctcctacctcagcctcccgagtagcttggactacaggtgcccgccactatgcctggctaattttttctattttagtagagatggggtttcaccatgttgcccaggctgttctcaaactcctgagctcaggcaatccgcccacctcggcctcccaaagtgctaggatttctctaaaattattccccaaatgataaagccaaggaaagctaaagtgcaattaataactgccttcaaataaagatgtttattgctggaagagtccttagagatcaagcaatccacactccccacacccgccacccccaccactccancttatgatgaagctgaggttccaagagacaagatttaccaaaactcaggaacctccctgactaccactttatatgtttctctgattagctaaaatttcaatgtcagggacccttagaaaccttagacagatcatatactttacagctgagacaactggaacaaccaataatcctggatcacacagccagatcccttctcttatagctttgtcttttcctacgccctcttcttgcctcccagaagagacgttccacaggtgtcaactaacttaggaaaaaagcagtctatgtacacaaaggatttagtttggatataaaaacccctttttc

SEQ ID NO: 5319 - DNA, 661 bp, Homo sapiens
  misc_feature [331]..[331]: Chromosome 18, SNP identification no. = rs11082250
  misc_feature [331]..[331]: allele = g, in linkage disequilibrium with rs930189, respectively
  misc_feature [331]..[331]: n is a, t, c or g
cctatttttccttaaaagactgaaatggatgcaatgccacatttgtactttggcagatgcctgtgatgtacaatttatgagaactaaaaaagcacccgtgtgccttgaactctccctatcatttgcccatcatggtgtttaaagttctcagcattagaaaattattccccaaacactaaaacttaaagcattgtatcttcagaatattccagtaaaatggctacttctaggaaggctaacacatgactcaaacagcagtcattaatacattaacatagcgagacactgagggattgaatgggacacagagcccatgcatggaagagtagantctgaagccatgggtgctgactagggaggggaagcataaaggttgcttaaaggtggattctaattgagccagattacaatttgagaagagcaagtagctgaatttctgaggaaaataaatagataaatgaaagaaagaaagaatgacctatttcataatttgagctatgattaactttgaatgattcctaagaaaagcataggctaacataagcctaatgactcatccagcaagaatttattgtacactgatatggtttggctctgtgtcttcacccaaatctcctcttgtagctcccataattcccaaatactgtgggaggaacctggt

SEQ ID NO: 5320 - DNA, 661 bp, Homo sapiens
  misc_feature [331]..[331]: Chromosome 18, SNP identification no. = rs1030620
  misc_feature [331]..[331]: allele = t, in linkage disequilibrium with rs930189, respectively
  misc_feature [331]..[331]: n is a, t, c or g
gtttattggacctacagttccacatggctggggagacctcacaatcatggcagaaggcaaggaggagcaggtcacaactcatgtggatggcagcaggcaaagggagagcttgtgcagagaaactaccgtttttaaaaccatcagatctcatgagacccactcactatcatgggaacagtgcaggaaagaccacctgcatgattcaatcatctcccaccaggttcctcccacagtatttgggaattatgggagctacaagaggagatttgggtgaagacacagagccaaaccatatcagtgtacaataaattcttgctggatgagtcattangcttatgttagcctatgcttttcttaggaatcattcaaagttaatcatagctcaaattatgaaataggtcattctttctttctttcatttatctatttattttcctcagaaattcagctacttgctcttctcaaattgtaatctggctcaattagaatccacctttaagcaacctttatgcttcccctccctagtcagcacccatggcttcagaatctactcttccatgcatgggctctgtgtcccattcaatccctcagtgtctcgctatgttaatgtattaatgactgctgtttgagtcatgtgttagccttcctagaagtagccatt

SEQ ID NO: 5321 - DNA, 661 bp, Homo sapiens
  misc_feature [331]..[331]: Chromosome 18, SNP identification no. = rs4890371
  misc_feature [331]..[331]: allele = c, in linkage disequilibrium with rs930189, respectively
  misc_feature [331]..[331]: n is a, t, c or g
taagggatacagaagataatttagtgtgtttcttttcttaagaagatggcaaaggagtaaagagataaaattaacagaaacatagcaacagaagaaatacaatggctatggtttagaagtatggccaatcagcattcactgaaccctaatatgatcaatggtgtgcattaggtatgaaggaagccatgatgccctcacagcctgaaagggaaaatggcctatgtacagaaataaccctactaggacagaaaatcaggtccagcctggaagtataagcaaaacctaagccatgagggtatgtgtttgggatgaggagagagtgggttattanatctactgtagaaagtcttcattgtgaatgtgtcactaaacctgaacctgaagtagacctcaatagttgaagatcagggatggtgcattatagaaggacacagagaagatatataatatatgtttctgggactgtaagcagtcctacagactggagtagagaagacgagaactcaggaggtagttcttgtacaaggtctgccccatggccttggcaatcttgacctttttccacttttaggcatcaagaaattccagaaaatcttgaagtgctcttaaacccttggcctatttctctaaagtggtagagtgaattagatccaaattcaag

SEQ ID NO: 5322 - DNA, 661 bp, Homo sapiens
  misc_feature [331]..[331]: Chromosome 18, SNP identification no. = rs12455820
  misc_feature [331]..[331]: allele = a, in linkage disequilibrium with rs930189, respectively
  misc_feature [331]..[331]: n is a, t, c or g
ggcctattatgtcttaagtagtcgataagttagtgcataggttgggagctcacttaacccttctagaagtcagaattcaacaatgtttagatacagaaaatgctgtgactgctttcagaaaacacaactatggaatatttttctatacatctgattggttagaaccccctcatatgtcataatactaataagattgcatgttttttgatagaaacaacatatcttctaattacagcataaatacaatgtacaatgcattatattttcctttatgcatgcttcagggacattacctgtggctctgaaatgttttagaagaccttaaggctantcaacaaccactctggataagtaaaaaaaaaaaaaaaaaaaaagattggtaataactgaggcaatttcaagattatcataaggatatcccacaaaatcaagctaacaatatatttagttttgatgtaaatttctcctgttgccttaattaaccccatctcaattctttctaatgaatactattctctgtctgcttcccatacatctttagaaccaaggagagaccagtgccacagtcaaggcagtttttctagtcaattacacaggatcctcctctaagaaagagcttatacttagtttaatgttcttcttactattaatgttatctttg

SEQ ID NO: 5323 - DNA, 661 bp, Homo sapiens
  misc_feature [331]..[331]: Chromosome 18, SNP identification no. = rs11663241
  misc_feature [331]..[331]: allele = a, in linkage disequilibrium with rs930189, respectively
  misc_feature [331]..[331]: n is a, t, c or g
aaagaaatattaagtaacttgttcagaaattcaaagtaaaaataagagttaagattaaaattccaaaatgtcaaattggcttctgttttggcttttgcatatctaactctgcatcaggactgtatttggatttctctttcattttcaatactttagtacattctgatttgttttacatgggtgcagggacacacatacacatacacacacctaaatgtcaagaaacacgtgttaaattcatagtctatagatattgatgttctatttagaaggaagtcagacaatatataaaagcttcagggaaaagtttccttgcataacaaaagagctnatgcatcaagttatggtttgttaatggcattcaattaacacataactgttgttagttgattaaaaattaactgtgaataactgtttaacatttagcacttacaaatgttacttgatttgttaaaattgtagagcaaaggagtctggggggaagctagaaatatttggttaggtttttaatggaaattttagacacattgtaaaatagttcttcctcgtaaatatacatttgtaaatcaatcttcatgttttaaccacttgtgaagaattttgcagacttcctgttttaaaagcacttgagaaataaatatctgccagggagagaaatccc

SEQ ID NO: 5324 - DNA, 661 bp, Homo sapiens
  misc_feature [331]..[331]: Chromosome 18, SNP identification no. = rs891805
  misc_feature [331]..[331]: allele = c, in linkage disequilibrium with rs930189, respectively
  misc_feature [331]..[331]: n is a, t, c or g
ggagagaaatcccatcagttttcttgctgttcctatacagatggcagaccatactgtgaaatttgctgttcttcgattgctccattctgcacacgccccaaggaatctcagaattgtagaaactagagatgtaatagactaaataggtcatctatttcaatagaaattttaccagatttatacaagactcttgaatttacaatacaactcacttccaagggggtccaaatgctgaagagaaaattggctttttttccccagccatcctagagtcatatattatgttctgctattaatcatgttcttctcttggtgaagataatacatcatnagaatgtgcacacagaatttcttttccaacaaaaggatacgatttgtagtgatccatttccaggctctcattagcacccccaccttcgaccccagaccaatggctgtatttgtaagacagctgtctgaggtctgaggagtaacccatggccctggaagaatgtgcaagtaggtggcccttgtgagggtaatattcaacagtttggtctctttaaacctatcctgactgggtgcagtggctcacacatgcaatcccaacaccctgagaagctaaggagagaggattgcttgaggtcaggagattgagactagcctgggcaacataatgaga

SEQ ID NO: 5325 - DNA, 661 bp, Homo sapiens
  misc_feature [331]..[331]: Chromosome 18, SNP identification no. = rs9675493
  misc_feature [331]..[331]: allele = g, in linkage disequilibrium with rs930189, respectively
  misc_feature [331]..[331]: n is a, t, c or g
cctcattctcatcaagaagtgctaaactaggaaaatgagggccagaggctgccagtggcaacttgcccaacacacagagagagcctgtctcagaaagaaaccagggtgagagaggtagagagatgacaaaccccaacaatatcactgaacaactaagatcagctgcccctgaggctacatccacattttaaatttctctggtctaggacttcccccacacaatttatagtttgaggtgggtttctatcacttataactgaaagagaactaattaatacatagagacacctgccaagtgcgatatacagataatgaaagtcaggagaattcnggataggagttcaagggaagactttccagaaaagatggaaatttgatctatgctttaaagaatttaggaagatagaaaggaaaatgagggcattccaggtaagatgatatataagagtataagccagtttcaaggggtagagacgatcaattttgggtgaagtggtggctacatataggataagaattagaaagttaggcagaataataagaatagtcttaataaatgtggaatgtaattgataatctaaaatagatacaatgtttgttaataagaataaagctctgaacaaacatcattttcatcatcattacacacaatcacaaatca

SEQ ID NO: 5326 - DNA, 661 bp, Homo sapiens
  misc_feature [331]..[331]: Chromosome 18, SNP identification no. = rs12103961
  misc_feature [331]..[331]: allele = a, in linkage disequilibrium with rs930189, respectively
  misc_feature [331]..[331]: n is a, t, c or g
gctacatccacattttaaatttctctggtctaggacttcccccacacaatttatagtttgaggtgggtttctatcacttataactgaaagagaactaattaatacatagagacacctgccaagtgcgatatacagataatgaaagtcaggagaattcaggataggagttcaagggaagactttccagaaaagatggaaatttgatctatgctttaaagaatttaggaagatagaaaggaaaatgagggcattccaggtaagatgatatataagagtataagccagtttcaaggggtagagacgatcaattttgggtgaagtggtggctacntataggataagaattagaaagttaggcagaataataagaatagtcttaataaatgtggaatgtaattgataatctaaaatagatacaatgtttgttaataagaataaagctctgaacaaacatcattttcatcatcattacacacaatcacaaatcagtttcactcataaaagcttcattatagactctctgttcacctagagaggatcctggactggacacaagcacaggacataatcctgttatgtagatgagtcagggtgcaccggggtaccagcattccacatgcaccctgactcatctacagacttcagcatccagggccatcca

SEQ ID NO: 5327 - DNA, 661 bp, Homo sapiens
  misc_feature [331]..[331]: Chromosome 18, SNP identification no. = rs7238810
  misc_feature [331]..[331]: allele = t, in linkage disequilibrium with rs930189, respectively
  misc_feature [331]..[331]: n is a, t, c or g
aagtgtgcttttgcatgcatgatacagaagcgaaaatcttgcagtgcttttttgagctgtatctgaaaagttcttttgtactcatgtacaggatggaaaacatatatcaaatgtcaagggaattgtctaataacactgatttttggggattagtggtaaggagtttgcagtaatttatgaagacaaattttgtaagcaatattatcaggaatatatttagatatatttaaatgtggatttggatagcggtatgaatttagatatgtaaatatctaggtataggtagagatagaggatgccaaccatctgagatcaccaaggccatttatantgttttgtttggatgtctccctttccagtaactcctggtcaaactgtgctcctttcagttctataagaactgctaaattacctgtagcttttatttagtgagacacctcatggaagtggagcattttctgtatgttagcaacaatttgtgaaaataccacaaaaatcgaatcatttgagccaccttgtaaatgctagttaaggaagggcaaaaattcgactatgactgactaagagaaaaatgttaagtaaagcctctatgtcattttcctctatttatttggagtttatacataaatatctcatagccagagagaaatgagcattcagt

SEQ ID NO: 5328 - DNA, 661 bp, Homo sapiens
  misc_feature [331]..[331]: Chromosome 18, SNP identification no. = rs9951582
  misc_feature [331]..[331]: allele = g, in linkage disequilibrium with rs930189, respectively
  misc_feature [331]..[331]: n is a, t, c or g
ttatcaggaatatatttagatatatttaaatgtggatttggatagcggtatgaatttagatatgtaaatatctaggtataggtagagatagaggatgccaaccatctgagatcaccaaggccatttatattgttttgtttggatgtctccctttccagtaactcctggtcaaactgtgctcctttcagttctataagaactgctaaattacctgtagcttttatttagtgagacacctcatggaagtggagcattttctgtatgttagcaacaatttgtgaaaataccacaaaaatcgaatcatttgagccaccttgtaaatgctagttanggaagggcaaaaattcgactatgactgactaagagaaaaatgttaagtaaagcctctatgtcattttcctctatttatttggagtttatacataaatatctcatagccagagagaaatgagcattcagtgagggtagagattaagatgaggaaaggaagccagtcttataacttctaaatagttgaacgttaattatttaattgacaaacattaagtacctagtatgttctaggcatcaaattatctgaatcacaatgacatacgtccttgtgtgcctgagttctagactatgagcttgctgaacagggactgcagctttccttttctgt

SEQ ID NO: 5329 - DNA, 661 bp, Homo sapiens
  misc_feature [331]..[331]: Chromosome 18, SNP identification no. = rs9951593
  misc_feature [331]..[331]: allele = g, in linkage disequilibrium with rs930189, respectively
  misc_feature [331]..[331]: n is a, t, c or g
gtaaatatctaggtataggtagagatagaggatgccaaccatctgagatcaccaaggccatttatattgttttgtttggatgtctccctttccagtaactcctggtcaaactgtgctcctttcagttctataagaactgctaaattacctgtagcttttatttagtgagacacctcatggaagtggagcattttctgtatgttagcaacaatttgtgaaaataccacaaaaatcgaatcatttgagccaccttgtaaatgctagttaaggaagggcaaaaattcgactatgactgactaagagaaaaatgttaagtaaagcctctatgtcnttttcctctatttatttggagtttatacataaatatctcatagccagagagaaatgagcattcagtgagggtagagattaagatgaggaaaggaagccagtcttataacttctaaatagttgaacgttaattatttaattgacaaacattaagtacctagtatgttctaggcatcaaattatctgaatcacaatgacatacgtccttgtgtgcctgagttctagactatgagcttgctgaacagggactgcagctttccttttctgtatcatagaatcaaaaccaatggcagatatgtgatagatgcttagtatttgttcaacagattaa

SEQ ID NO: 5330 - DNA, 661 bp, Homo sapiens
  misc_feature [331]..[331]: Chromosome 18, SNP identification no. = rs11082252
  misc_feature [331]..[331]: allele = g, in linkage disequilibrium with rs930189, respectively
  misc_feature [331]..[331]: n is a, t, c or g
ttaatatcacatctcaaagccagccccaaaagtaggctttttaaaaagttataatgaactaagcttaccttcacatggaaatatattttgcaagtcactcaagactataactgctcaagctcattaacatcagtgaagctttataaggacattgataaaatctggccatttttcctcaggcatattcaataaggttaaacacttctcagagatcatgtaagataaggtctaaaaggtatgctagattgagttgcagatacccttcatactctctgccaggagagtggaagtgtagagtggggatggaaagcggaaggcagtgaattggagnctgagtgtgtaagctcaagaagtttggctcttctccaaagagagaaagaaaagaccatttctacagagaggtgtggagtgcagagaggttgttttgaggatttttttgttttttaagatagaagaggcttaaacatattgatagaataaagaaaaacaaccaataaagaggaagaagtcaaaaatgaggagaaaggctgaaaatgacaatgtcataggggagaggtcagggggatggatcgtaagaggctctggagagattcttcatctgttccccaggaaaggagaatagactgcataaaggcataaatttctcagaaagtaaaacttt

SEQ ID NO: 5331 - DNA, 661 bp, Homo sapiens
  misc_feature [331]..[331]: Chromosome 18, SNP identification no. = rs2878293
  misc_feature [331]..[331]: allele = g, in linkage disequilibrium with rs930189, respectively
  misc_feature [331]..[331]: n is a, t, c or g
tcagaaagtaaaactttagatcatctgctataagagggctagatttggggctggggttttgtggaaatgaaagtggttcttcgctggagagcagagatttgtggaggcagagactagaccttacctgacagagatgagaaccatggagataagtaggctaacaaataaggtgaaacgatgctaaatagcagcctggaataaaatgagagaatctggaagtccactatgctaagaaagatagaagaagggtcaaaggccacagagccagtttcagatgttagttgattaaaagaaacacaccaaaaaaacagagtgtgatcttgaaattatnagcttgaattagaagaacaaatattactttaagttttaaggctggtacaggtacaggaaggtcaaatatattttgtctcatgaagtgctgtgttgacaaggattctaagaatccatctaggcttaatggaaaagagtgtcatcatcgatgagtgatatctgcactgaggtagtaagagtagaaacatatggcatgtttttgccacttcttacttaggctgtcaatgtgaatactgaggtcacctaggaccttagagagattaaaatgggaaggcagtaatcataatcctaaataaaaaagggtggtgaggagtagccaccagttgcaaaa

SEQ ID NO: 5332 - DNA, 661 bp, Homo sapiens
  misc_feature [331]..[331]: Chromosome 18, SNP identification no. = rs4563117
  misc_feature [331]..[331]: allele = a, in linkage disequilibrium with rs930189, respectively
  misc_feature [331]..[331]: n is a, t, c or g
tgctataagagggctagatttggggctggggttttgtggaaatgaaagtggttcttcgctggagagcagagatttgtggaggcagagactagaccttacctgacagagatgagaaccatggagataagtaggctaacaaataaggtgaaacgatgctaaatagcagcctggaataaaatgagagaatctggaagtccactatgctaagaaagatagaagaagggtcaaaggccacagagccagtttcagatgttagttgattaaaagaaacacaccaaaaaaacagagtgtgatcttgaaattataagcttgaattagaagaacaaatatnactttaagttttaaggctggtacaggtacaggaaggtcaaatatattttgtctcatgaagtgctgtgttgacaaggattctaagaatccatctaggcttaatggaaaagagtgtcatcatcgatgagtgatatctgcactgaggtagtaagagtagaaacatatggcatgtttttgccacttcttacttaggctgtcaatgtgaatactgaggtcacctaggaccttagagagattaaaatgggaaggcagtaatcataatcctaaataaaaaagggtggtgaggagtagccaccagttgcaaaacctaaaataagagggattttttcat

SEQ ID NO: 5333 - DNA, 661 bp, Homo sapiens
  misc_feature [331]..[331]: Chromosome 18, SNP identification no. = rs1347022
  misc_feature [331]..[331]: allele = g, in linkage disequilibrium with rs930189, respectively
  misc_feature [331]..[331]: n is a, t, c or g
aaggctggtacaggtacaggaaggtcaaatatattttgtctcatgaagtgctgtgttgacaaggattctaagaatccatctaggcttaatggaaaagagtgtcatcatcgatgagtgatatctgcactgaggtagtaagagtagaaacatatggcatgtttttgccacttcttacttaggctgtcaatgtgaatactgaggtcacctaggaccttagagagattaaaatgggaaggcagtaatcataatcctaaataaaaaagggtggtgaggagtagccaccagttgcaaaacctaaaataagagggattttttcataataatggaagantaagatctggaagcaacaatagggaatttaaaaaatgcttacaaaatatcagaagacaagcctctctgttagcacaagggcaactttagcaggaagccaggtttgcattaagaactttgttagaaacagagtcccagtttaaccatgcagttgttctctgtaatataccctctttgggcttgccacggagaaaacctggttgagctgggtgcatacatcatttaggtatatatgttaggccattcttgtattgttataaaggaacacttgagactgggttatagataaagaaaagacatttaattggctcacagttctgtaggctttaca

SEQ ID NO: 5334 - DNA, 661 bp, Homo sapiens
  misc_feature [331]..[331]: Chromosome 18, SNP identification no. = rs12185424
  misc_feature [331]..[331]: allele = c, in linkage disequilibrium with rs930189, respectively
  misc_feature [331]..[331]: n is a, t, c or g
acagttctgtaggctttacaggaagcatggcaccagcatctgctcagtttctggggaggcctcaagtagcttttactcatggcagaaggtgaagtgagagcagatacatcacatggagagggtgggagcaagagagagagggagggaggatgccacacacttttaaacaaccacatctcatgataactcactcattttctcaaagacagcactaaagggaaggtgctaagccattcatgagagttcctctcccataatcctaccaggctccacctccaacattggagactacatttcaacatgagatttggtggggacaaatatccaaatngtatccgtatacctgagcattgaatgggatcttacacaggtaagtggataaaaacaatctgtgaccccattctgaaaatggcactctctgattccaaacttccattgaaaggctatattccttaacttggcttcaaccaagtttcttgttttctccacaactcccctatctaattttctgtcctaatcaggctggtatggtcaccaccaatacctgttgccatcttttcagcctcgcgcccctctttctgcatcattccaaagtcagatgccctctttgttcctttccggctattaaaatctttcatgtccttccaagctcagcccatta

SEQ ID NO: 5335 - DNA, 661 bp, Homo sapiens
  SLC14A1
  misc_feature [331]..[331]: Chromosome 18, SNP identification no. = rs17674580
  misc_feature [331]..[331]: allele = c, in linkage disequilibrium with rs4362470, respectively
  misc_feature [331]..[331]: n is a, t, c or g
atccttcttgcctggttttacatatttaaataacaaattccaaaagtaaagagtatctgaggcagtcacatgacataaggacaaattcaagccatcttggacttgcagagggtggggagaccgtgtcaacacacacaattttaaaaatttcttccctttcaatcttttaaaaacaaaactttttataaaataaaaatgtaatttaaaaaggctacctgtcttggcaagtagctgatcagcctgcattggtgagcaggccattccataacctggtttcttgctccttaattgacagcatggagctaacgtacttaatttcagctctttctangtgatttgactcattctgttaacattaactgtttttcagtcttctcaactagactgaactccttaagtgcaagaaatacacgcttagtaaatgtttgttggaccagacactgcaccttatgaaattaaagaccagaacattctcatggtagcattacagacactgatggcaaaggtactgtgggatttgggtttggctaataagctctgtggtggtgtttcagaaggaaaatggtgctctcttagttctatggaacatagtggtccagatcttctactgtaaccaggcccaaagctggctaatctggagggctctgccttagggatactt

SEQ ID NO: 5336 - DNA, 661 bp, Homo sapiens
  SLC14A1
  misc_feature [331]..[331]: Chromosome 18, SNP identification no. = rs692899
  misc_feature [331]..[331]: allele = t, in linkage disequilibrium with rs4362470, respectively
  misc_feature [331]..[331]: n is a, t, c or g
aggtcagaccaggagatatttggagctgtagttataggtatgaccagtttggctggaaagaatggattgtaatgtcctgtggctgaaaggtacattgacaacgccatgttgaaagggagggtgaagacggggaggtcccatttgctgagcatggaattcaatgcacttgagaaaattgggctaaaaaaagaacagagcaaaagaatgtgcatgtgacaaagcaggctgacacacggaatcgctatactctggaggggctttgtttcacctgccaacaggccccttacgtgttgtgttggcacatttgccacagaaagaaaacttgggatanatcctattatagaggcagtaaatattacataaagtaaaaaatcaactctcagcttatttggcttttgaaaaattctactctggggttgctcagagtgagctatatattgagattttaaaaatatttttgaagtacttatgacatacaaaataaaatattatctacatagttaaagtcccctttgtccctccacttgctcttatgtccctccctccccactagaggcaaccctgattctgatttggcagatattatttctttaatatacctatttttggaaaagagaaacaatcgttcaaggatgcaggtagtgtgagctggaggaaaatg

SEQ ID NO: 5337 - DNA, 661 bp, Homo sapiens
  SLC14A1
  misc_feature [331]..[331]: Chromosome 18, SNP identification no. = rs493363
  misc_feature [331]..[331]: allele = g, in linkage disequilibrium with rs4362470, respectively
  misc_feature [331]..[331]: n is a, t, c or g
gccagcccttaaggcatgtggcctccagcctggttttaaatcttccatagtctactccctccaatcaaaaaactggatgcttactcttagagcttctgacagaacctctctattctgcttttccttatggcatagctcatagaacatctacaataatttagggttcccaagctttggtaggcatcagaatcacctggggagctttaaatacccaaacaggcttcatctcagaccctctaaatcacaatctctaagggtggggcctggaacctgttttaacaaactccccaaattgtgatgcgggccagagtttgagaaccactgtatcaangggtgaatcctatgtatctctttaaagatggctataaagagattctgtattttttaaaacctggttaacccaaatcaaattccagctcttcctgttggtgtgtaataaatatgtttaaggtttctggattatcaagaacaagagaacacctgaaattagaagaaaaccaaagaaaccttacctttttaatgtgctctcccactgtcaggttatgaaacgcccttttgtcttctttgttgagtgatcaaaacacacgaggagctcaagtcaccttctccctagcttcttgccagaaaactaaagggagcacctggaaataattcagaagga

SEQ ID NO: 5338 - DNA, 661 bp, Homo sapiens
  SLC14A1
  misc_feature [331]..[331]: Chromosome 18, SNP identification no. = rs493262
  misc_feature [331]..[331]: allele = a, in linkage disequilibrium with rs4362470, respectively
  misc_feature [331]..[331]: n is a, t, c or g
agtgaataagcaagttaataaagtttacagttgcctaaataagcaagtacccaaaacaaaaacttatacttacgacaaatccaaaataaaaattctatacagtatcaatggttttagtagtcatcaggggtgggccttctcagaggaagtaaaggcaggcttgggtatcagtcatatttggggagaagatacagatgttgataaacttaagcaattgagaggagaaaataaacaagcttgattcttaataagttatgcaaatccaccagaaaaactgtttttccagacttttaaatagtgctgagcgagtgctagacactatttgttctangagtttcagacatgcattaactaacttaatcatcagaacaactgtatgaattaaatatggtaacttccattttctaagatggggaaactgaggcatagaaaggttaagtaatttgcttacattcataagcaaatacgctagtaagtagcagacctgctggaattgaatccaggctgtctggcaccagagtctgagctctttagctcagttgactgcctcaaccattatgctacaccagttaaaaaaaaaaaaaatctatccaaaggaaggtgagtgtggtaggaagaataatggtctccaaagacgtctacatcttaaacctcagaactt

SEQ ID NO: 5339 - DNA, 661 bp, Homo sapiens
  SLC14A1
  misc_feature [331]..[331]: Chromosome 18, SNP identification no. = rs4890588
  misc_feature [331]..[331]: allele = t, in linkage disequilibrium with rs4362470, respectively
  misc_feature [331]..[331]: n is a, t, c or g
agaaacaccaggataaaaagacaaaatattggtaaaaggacagaagtctatggtaaagtaaatgaggatcacagagcctctcccaccatgtctgccacatccccacacaccaagatagctgacgtaccagacatgaagacgagatggtgagtgtgtctcacggtgagctccggtggcccaagtggctgtgtggccattatatgaaggtcattcttcaggctgtccccatgaaacctgagggcttccctgagcctctgtgagccttctcttcaaccaaaactgaggaatagataattagctggttgagatctttgcttttgttgttttacantgaaagtcacccatatactcgaattactgattctacaattttttggccactcaaagcaaataaaaacataagacgttggctgggcgcggtggctcatgcctgtaatcccagcactttgggaggccgagacgggcagatgacaaggtcaggagattgagaccatcctggttaacatggtgaaaccccgtctctactaacaatacaaaaaaaaaaaaattagctgggcgtagtggtgggcacctgtagtcccagctactcgggaggctgaggcaggagaatggcgtgaacccaggaggcggagcttgcagtgagcagagatcacgccagtgc

SEQ ID NO: 5340 - DNA, 661 bp, Homo sapiens
  SLC14A1
  misc_feature [331]..[331]: Chromosome 18, SNP identification no. = rs474270
  misc_feature [331]..[331]: allele = g, in linkage disequilibrium with rs4362470, respectively
  misc_feature [331]..[331]: n is a, t, c or g
tttatttgccatggaaggcctttcccttaagtattagcaataacaacaaaatagtaaccataaaaaaactacctttattgagcacttactgtgtgctaaacacatgcattatttcctttcatcctcacaccaacaccatgaaaaatatattcctcttacttccattgtacaggtgaggaaatggaggcttaaaacagagcccatggagctcctaagtgatggagccaggatttgaacccaggactgctgactttaggctcatgcttgtaatcagggcactgtgcattccaggtgatttatattggaaggcagcctttcctgtgattaaaantgcatctacgaagcattgttctttccctcctttttttttctgtagccctgttcacggcctatcttggagtcggcatggcaaactttatggctgaggtgagtttgctttagtctcacttttcattagcgtaattgaccagcttacaactatatgggaaatgctcctgaagtccactgggctggcatccagtggcaggatccatgaccatgagaagcactgctctcccttctcctggagctccctggcctttctttcagcatcacagcaaactttagtccaaaccacaatcacccagttgttacaagtatcagattgcttggtttaaaaaaa

SEQ ID NO: 5341 - DNA, 661 bp, Homo sapiens
  SLC14A1
  misc_feature [331]..[331]: Chromosome 18, SNP identification no. = rs2282616
  misc_feature [331]..[331]: allele = a, in linkage disequilibrium with rs4362470, respectively
  misc_feature [331]..[331]: n is a, t, c or g
tctttgttgacatgtgaagggccccatgtgctctgatgtactctccatcatgcatgtgtgtaatgggactttggctttccaccagaaagacactgtgtctccttaaggaccctcccagataaaatctccatgctgctgccaaaagggctagatactgccttgactccttagcagccatgaccacatcaacatggactaagctatcagaaaccggccctgcatcacctgcaatggaatatctggctttctgtttaagtaaaagatatcctaaagtctacttcttatcacttagagttagactctgaacttgataatatgttatacaacctangtttcatttttttttaaaccaagcaatctgatacttgtaacaactgggtgattgtggtttggactaaagtttgctgtgatgctgaaagaaaggccagggagctccaggagaagggagagcagtgcttctcatggtcatggatcctgccactggatgccagcccagtggacttcaggagcatttcccatatagttgtaagctggtcaattacgctaatgaaaagtgagactaaagcaaactcacctcagccataaagtttgccatgccgactccaagataggccgtgaacagggctacagaaaaaaaaaggagggaaagaacaatgcttcg

SEQ ID NO: 5342 - DNA, 661 bp, Homo sapiens
  SLC14A1
  misc_feature [331]..[331]: Chromosome 18, SNP identification no. = rs2282615
  misc_feature [331]..[331]: allele = c, in linkage disequilibrium with rs4362470, respectively
  misc_feature [331]..[331]: n is a, t, c or g
tactctatcagaaataccaaaggacagggcctaaggctccatatttttctgtcttcctagctgactctggtgtgcagcttgcccatttgggtcctgggactgatgcctgtgaatcttctttgttgacatgtgaagggccccatgtgctctgatgtactctccatcatgcatgtgtgtaatgggactttggctttccaccagaaagacactgtgtctccttaaggaccctcccagataaaatctccatgctgctgccaaaagggctagatactgccttgactccttagcagccatgaccacatcaacatggactaagctatcagaaaccggncctgcatcacctgcaatggaatatctggctttctgtttaagtaaaagatatcctaaagtctacttcttatcacttagagttagactctgaacttgataatatgttatacaacctacgtttcatttttttttaaaccaagcaatctgatacttgtaacaactgggtgattgtggtttggactaaagtttgctgtgatgctgaaagaaaggccagggagctccaggagaagggagagcagtgcttctcatggtcatggatcctgccactggatgccagcccagtggacttcaggagcatttcccatatagttgtaagctggtcaattacgct

SEQ ID NO: 5343 - DNA, 661 bp, Homo sapiens
  SLC14A1
  misc_feature [331]..[331]: Chromosome 18, SNP identification no. = rs6507641
  misc_feature [331]..[331]: allele = g, in linkage disequilibrium with rs4362470, respectively
  misc_feature [331]..[331]: n is a, t, c or g
cacagtgtctttctggtggaaagccaaagtcccattacacacatgcatgatggagagtacatcagagcacatggggcccttcacatgtcaacaaagaagattcacaggcatcagtcccaggacccaaatgggcaagctgcacaccagagtcagctaggaagacagaaaaatatggagccttaggccctgtcctttggtatttctgatagagtaggtcttgtatgatgcttgaacatctgtgtttttttttaactcccccagatgattctgatgtgcagtcagattagggtacccctacactccatcacaccccagggaggtccatgcatcnggtcagagctaaccaatggtgtatgctcagaattgtgtgagtttccatgagcagcacaaagaggacctaccctcaaggaacttagagtctatttgggagacagaatggaaagaaacaaagcaagtcaagtctaagatctagaccaggcagaagtcaaggtcagagaggtcactgtgggctggactaatcagagaaggccttgtggacatgaagactggtcaggggccatttgcagtttgcaagtgtcatctctgtcaaatgttctcttggcacatctggtgcaggaagtctgaatatatgagagggagagaaagacatacaagatagaga

SEQ ID NO: 5344 - DNA, 661 bp, Homo sapiens
  SLC14A1
  misc_feature [331]..[331]: Chromosome 18, SNP identification no. = rs17142
  misc_feature [331]..[331]: allele = g, in linkage disequilibrium with rs4362470, respectively
  misc_feature [331]..[331]: n is a, t, c or g
cactgggggcattgctctggattctgtgcatgctcgtggagactgaatttacaatctcagggcattgagttgttggaatgttgacatccattctttagggcagccacttatgtctctatcttgtatgtctttctctccctctcatatattcagacttcctgcaccagatgtgccaagagaacatttgacagagatgacacttgcaaactgcaaatggcccctgaccagtcttcatgtccacaaggccttctctgattagtccagcccacagtgacctctctgaccttgacttctgcctggtctagatcttagacttgacttgctttgtttntttccattctgtctcccaaatagactctaagttccttgagggtaggtcctctttgtgctgctcatggaaactcacacaattctgagcatacaccattggttagctctgacctgatgcatggacctccctggggtgtgatggagtgtaggggtaccctaatctgactgcacatcagaatcatctgggggagttaaaaaaaaacacagatgttcaagcatcatacaagacctactctatcagaaataccaaaggacagggcctaaggctccatatttttctgtcttcctagctgactctggtgtgcagcttgcccatttgggtcctgggact

SEQ ID NO: 5345 - DNA, 661 bp, Homo sapiens
  misc_feature [331]..[331]: Chromosome 18, SNP identification no. = rs1944336
  misc_feature [331]..[331]: allele = t, in linkage disequilibrium with rs4362470, respectively
  misc_feature [331]..[331]: n is a, t, c or g
gggagagaagaatagttgaagaagatgagttttgtcctggatatgttgagtttgaggaagtgcttttggaacagtccctgtagggagttgaagataagctctggattgaagcatgagaaggatgggattggcgaggaagagtgtgcagcatgagaggagaagtgatccttcagtgctccatcgatggtgtggcaccaccattcaccttgtagcccaagctacaaatcaggaagccatccttgacacctccccctccctcaccctgcaaatcaactcatcacagagttctggtgattctgcctcctgtctctcatatccatgaacgtctctncatcaccactgaagtccaagccaccatcacttctctcctgcactactgcaatggcctcccagttggcttgctgaattcactccagcaccctttcattcaccataatccagccacagcaatcttctcactccttgaaagcaccaatctccttgtttcaaggcctttatccacaagtttccctttgccaagggtactgttccctccacactccaccttcctccacctcctgcctattccttagatctctgcctaaacctcccttcctcagtgtggacacatgtgtttttaccctgtaagacaagtctacataggaagccaaatagcttgtga

SEQ ID NO: 5346 - DNA, 661 bp, Homo sapiens
  misc_feature [331]..[331]: Chromosome 18, SNP identification no. = rs8090267
  misc_feature [331]..[331]: allele = t, in linkage disequilibrium with rs4362470, respectively
  misc_feature [331]..[331]: n is a, t, c or g
gatggagcactgaaggatcacttctcctctcatgctgcacactcttcctcgccaatcccatccttctcatgcttcaatccagagcttatcttcaactccctacagggactgttccaaaagcacttcctcaaactcaacatatccaggacaaaactcatcttcttcaactattcttctctccctcccatgttgactcatggagaaaggtagcaccttccacccgaatgggaaagccagaaacaggatgccatccttgacctcattctctcacctccaggaaatagttagccaagggctgagggttccacctccttgatagcccccattcatncatttattgaatgactgtttactacataacaggaactgtgactacaatagtgaaccagacggccatagtctcttccctcacaaaaactttatgaggtgaactgacaagtaaaggagtaatataatatagtgcagtgatgataatgagtaagagacaaccagttaacaagtttgagggaagagtatgccagtgacctctttcttctaaaaaacgaagacagtaatatatcattaagtaccaggcatccataacagttaggatgcctttgcctgcaagtaacaaaatacctgacagaaagtggttaaaacaacaggaatttcattcctaaaa

SEQ ID NO: 5347 - DNA, 661 bp, Homo sapiens
  misc_feature [331]..[331]: Chromosome 18, SNP identification no. = rs11874337
  misc_feature [331]..[331]: allele = a, in linkage disequilibrium with rs4362470, respectively
  misc_feature [331]..[331]: n is a, t, c or g
aatatagtgcagtgatgataatgagtaagagacaaccagttaacaagtttgagggaagagtatgccagtgacctctttcttctaaaaaacgaagacagtaatatatcattaagtaccaggcatccataacagttaggatgcctttgcctgcaagtaacaaaatacctgacagaaagtggttaaaacaacaggaatttcattcctaaaagtaggaagttccagattttgtgctcaatgatgtcaccaaggggtgcaatttctttccatcttcctcatcattctcagcatcctcagaaggctccactttcatcctagagcttgtagcctcatngttacaacatggctgccctggttacaaacatcacaaccacatcaagaagaaggggggcaaatagagttgcaagagggccattctctcatgtttctcttctttatcagggagggaagtctttcttagaagctcctctaaaataatttcacttgtgtctttttggcagaactgggttgtatggccattcatggctgcctaaaaaatctgagaaagtaggcatctggtatgtagcttctcttgtaacaggtgaactctgccatattggagcaaaagcaagaggaatggcaattggacaggcagccaacatggctgctacagtggtatatagta

SEQ ID NO: 5348 - DNA, 661 bp, Homo sapiens
  misc_feature [331]..[331]: Chromosome 18, SNP identification no. = rs9953451
  misc_feature [331]..[331]: allele = c, in linkage disequilibrium with rs4362470, respectively
  misc_feature [331]..[331]: n is a, t, c or g
cagggagggaagtctttcttagaagctcctctaaaataatttcacttgtgtctttttggcagaactgggttgtatggccattcatggctgcctaaaaaatctgagaaagtaggcatctggtatgtagcttctcttgtaacaggtgaactctgccatattggagcaaaagcaagaggaatggcaattggacaggcagccaacatggctgctacagtggtatatagtaccaccatatagcatgtagttcctatgtgcccacacaagagagagacatagtgataggttagactgtctattgtgagattcacaaaggggtttggaacagaaatcnagaccaagaccttttacacaagagattctttgtggaatacttgctggaatattcccagagtattttgggataccccagactcatacaaggttgtataacctctaactaacaagattctaagcaaaggatgagacgtgatcatgctcaggtaacgaaaacttagggtcaattcatgttctaattagttctcttgatctaacagttacggcttataaatcattccatgtcggaagccccaccggaaatagttgaggttcaattcagttacagctcaatgaagtctgaaaacaagtgtccaacattttctggttcatggtttaaaataggttt

SEQ ID NO: 5349 - DNA, 661 bp, Homo sapiens
  misc_feature [331]..[331]: Chromosome 18, SNP identification no. = rs9966818
  misc_feature [331]..[331]: allele = t, in linkage disequilibrium with rs4362470, respectively
  misc_feature [331]..[331]: n is a, t, c or g
tgctacagtggtatatagtaccaccatatagcatgtagttcctatgtgcccacacaagagagagacatagtgataggttagactgtctattgtgagattcacaaaggggtttggaacagaaatctagaccaagaccttttacacaagagattctttgtggaatacttgctggaatattcccagagtattttgggataccccagactcatacaaggttgtataacctctaactaacaagattctaagcaaaggatgagacgtgatcatgctcaggtaacgaaaacttagggtcaattcatgttctaattagttctcttgatctaacagttanggcttataaatcattccatgtcggaagccccaccggaaatagttgaggttcaattcagttacagctcaatgaagtctgaaaacaagtgtccaacattttctggttcatggtttaaaataggtttcaaataaacaatgaggaagccagtttcctgtttgggttgggtccattggatcctagcccatcaaagctttgaattatattacaatgacaggcaaggactagagggggaagaactgaaacgcagagaaaagttggcacagtgccaggaaacctggctaaaattaagtccctcagtccaaagaaaacaatggcagctaggacatgagt

SEQ ID NO: 5350 - DNA, 661 bp, Homo sapiens
  misc_feature [331]..[331]: Chromosome 18, SNP identification no. = rs8096392
  misc_feature [331]..[331]: allele = g, in linkage disequilibrium with rs4362470, respectively
  misc_feature [331]..[331]: n is a, t, c or g
aaccccttctctactaaaactacaaaaaattagccgggtgtggtggcaggtgcctgtagtcccagctactcgggaggctgagacaggagaatcacttgaacctgggagggggaggttgcagtgagccaagatcgcaccactgcactccagcctgggtgacagagcgagactctgtctcaacagaaaaaaaaaaaaattaactatggcaatgtaaatgataacttatctttacaggtgcaatcacccctcttcccacctgatacaaatgcatatctgattattcccacccacccaccccccaccgccccatttgtctgttaatcttatgtanaagtgcagattccttgcatttcccctgtcccatgtggccatgttacataaaaatgcagattcactgagctagacaaagacatgaatattttctccctacccacctcttgcatgaaaattgtgtacttctcactatcctgccctttcctctttaaatctggagccctcaaaatcatcttcagagaaaagcatagacctgtcgcccagatgtgcatccttaactttggcaaataaacctcctaaaatgattgagacttgtctcatcatttttctctattgacataatgggccctcctacataaaagccactgcacattcagaaaattcagag

SEQ ID NO: 5351 - DNA, 661 bp, Homo sapiens
  misc_feature [331]..[331]: Chromosome 18, SNP identification no. = rs572858
  misc_feature [331]..[331]: allele = a, in linkage disequilibrium with rs4362470, respectively
  misc_feature [331]..[331]: n is a, t, c or g
agtcccacttgtcccacctctgccctacacattcctcatggacagcgcccatcacctgccgctctgcccctcactgccaatcacagggccctgcaagctccaagccacacggccaatggtagcctaaggacccccttcctgcacacctcgaattgaccaccactgtctgctcatcctaggaacctccaaattcaggccctttcaaccctcaggactccagattattcttccctatacccacatctaggactgacccactgctgattcacaccagtgcagacattcaaattattaaaatattcagttcttttgcacactttgtggtaagtanccactgccctgagccctgtcacttgagtctctctatgaccttcaggaatttctccacaatccagcaactaaagggttaacacaaagcacagctgtgagttccagcaatcgttctgattggtcagtccccttgccttaccaggtgattaaggttttaaatttcactgtggcaccacacggcagataaattttgtatgcctaatgctggttgtaatttaatgcaaataatcatttcttttgaggctgcaagatggggtctaaggactctggactcagcgtgaggtgcatgagggcatgcaaacacctggcatcaggatcgtgcagtcacacc

SEQ ID NO: 5352 - DNA, 661 bp, Homo sapiens
  misc_feature [331]..[331]: Chromosome 18, SNP identification no. = rs2005378
  misc_feature [331]..[331]: allele = c, in linkage disequilibrium with rs4362470, respectively
  misc_feature [331]..[331]: n is a, t, c or g
tgggaagcatgcggggaagacaaaaacaacaaatggccattagagcaggcaagctgggatttgaagattacaagaagaggaagtaaccacgtaaatggcatggaggagggaagctgcttcttagcctgggctcacacctcatttgactaacgagtcaaatccttgctgactggcttgtctcttcactgcaatatgttcagaggaacacgactttaaatgatgcattgtcctgggtttcctcttgtacacccctcttatgcctcattcctttcctttgcatgatactcccctagttctggatggccaccttccttggatttcccatgaaaantaatctttctagagtctttttcctataggactttctctatttttttattttattttatttatttattttttttgagacggagtctctctctgtcacccaggctaaagtgcaggggtgtgatcttggatcactgcagcctctgcctcccaggttcaagcaattgtcctgcctgagcctcctgagtaactgggattacaggtgcccaccaccatgcccggctaattatgtatttttagtagagacggggttttgccatgttggccaggctggtctcaaactcctgacctcaagtgatccatcccagcactcaagtgctgggattacaggcgt

SEQ ID NO: 5353 - DNA, 661 bp, Homo sapiens
  misc_feature [331]..[331]: Chromosome 18, SNP identification no. = rs550201
  misc_feature [331]..[331]: allele = c, in linkage disequilibrium with rs4362470, respectively
  misc_feature [331]..[331]: n is a, t, c or g
gaaggtggccatccagaactaggggagtatcatgcaaaggaaaggaatgaggcataagaggggtgtacaagaggaaacccaggacaatgcatcatttaaagtcgtgttcctctgaacatattgcagtgaagagacaagccagtcagcaaggatttgactcgttagtcaaatgaggtgtgagcccaggctaagaagcagcttccctcctccatgccatttacgtggttacttcctcttcttgtaatcttcaaatcccagcttgcctgctctaatggccatttgttgtttttgtcttccccgcatgcttcccaccttcttctagtaacagcgnctccccttccttaagggatctcctccttccccatccatggggtcctctgaggctgctggcctcaataccataatctcaaacacagtggagtcagtgactcagctgtaatcaatcatagtatctcaatcccctggccatggggattggtccaagggacagccacctaacccaaactgaggcaataagattcttccctgcaggaatttgaaatctaagtacacagacatccaggatgaagggaaatcgaggctgggtctgagaatagtgctctaagagaaaggccatgagatacccagagccatcctggtttctttccctcccaagcccagg

SEQ ID NO: 5354 - DNA, 661 bp, Homo sapiens
  misc_feature [331]..[331]: Chromosome 18, SNP identification no. = rs576687
  misc_feature [331]..[331]: allele = g, in linkage disequilibrium with rs4362470, respectively
  misc_feature [331]..[331]: n is a, t, c or g
tattacatcaaggtaatagtaacctgggcttgggagggaaagaaaccaggatggctctgggtatctcatggcctttctcttagagcactattctcagacccagcctcgatttcccttcatcctggatgtctgtgtacttagatttcaaattcctgcagggaagaatcttattgcctcagtttgggttaggtggctgtcccttggaccaatccccatggccaggggattgagatactatgattgattacagctgagtcactgactccactgtgtttgagattatggtattgaggccagcagcctcagaggaccccatggatggggaaggagnagatcccttaaggaaggggagtcgctgttactagaagaaggtgggaagcatgcggggaagacaaaaacaacaaatggccattagagcaggcaagctgggatttgaagattacaagaagaggaagtaaccacgtaaatggcatggaggagggaagctgcttcttagcctgggctcacacctcatttgactaacgagtcaaatccttgctgactggcttgtctcttcactgcaatatgttcagaggaacacgactttaaatgatgcattgtcctgggtttcctcttgtacacccctcttatgcctcattcctttcctttgcatgatactccc

SEQ ID NO: 5355 - DNA, 661 bp, Homo sapiens
  misc_feature [331]..[331]: Chromosome 18, SNP identification no. = rs10502870
  misc_feature [331]..[331]: allele = g, in linkage disequilibrium with rs4362470, respectively
  misc_feature [331]..[331]: n is a, t, c or g
ccatccatggggtcctctgaggctgctggcctcaataccataatctcaaacacagtggagtcagtgactcagctgtaatcaatcatagtatctcaatcccctggccatggggattggtccaagggacagccacctaacccaaactgaggcaataagattcttccctgcaggaatttgaaatctaagtacacagacatccaggatgaagggaaatcgaggctgggtctgagaatagtgctctaagagaaaggccatgagatacccagagccatcctggtttctttccctcccaagcccaggttactattaccttgatgtaataacaacattnactatcccccagccccatatctttccaataaactgaattggtacttaagttagaatctgtttgtgtcatttcaaacacaaccaaaattgatacagaatattacaagtgacatctctagaagatggaataggcagagtcaagaaggggcggggatctgacagttcttgctacatggttaaatgattagctgatacatattgtgacccaaaccgtatgtacccatggctaaagcattagaaaaggcttggtaggaaaatgtcaggatattagagagctctgactgatcactttagcttagactaaagcaggatgcatggacatgttggggtt

SEQ ID NO: 5356 - DNA, 661 bp, Homo sapiens
  misc_feature [331]..[331]: Chromosome 18, SNP identification no. = rs1626743
  misc_feature [331]..[331]: allele = g, in linkage disequilibrium with rs4362470, respectively
  misc_feature [331]..[331]: n is a, t, c or g
tgggatgattacaggcaagcaccactatgccctgctaatttttcatatttttagtagagacagggtttcaccttgttggccaggctggtctcaaactcctgacctcaggtgatccaccagcctcggcctcccaaagtgctgggattacaggcatgaaccaccatgcctggctttttttttttttttttttttttaagacagagtctcactctgttgccaaggctggaatgcatggatgcgatctcggctcactgtagcctccgccttcccagttcaagtgattctcctgcctcagcctccctagtagctgggattacaggtgtccaccacntttttgtatttttagtagatacgggttttcaccatgttggccaggctggtcttgaactcctgacctcaggtcatctgcctgcttcggcctcccaaagtgctgaaattacaggcatgagccaccatgcccagcccaacccactgttttcctttgcctgttggattctgccaataggatgaaatacagagagaatggagggaagagggatttgcccctttcagcagtagtttccagctccttgtcactttgccacaacctgacccatcaggcccccttaaagggtgcagcaccgctaagtcattcattccttcctcagtgagttctgtccct

SEQ ID NO: 5357 - DNA, 661 bp, Homo sapiens
  misc_feature [331]..[331]: Chromosome 18, SNP identification no. = rs475584
  misc_feature [331]..[331]: allele = g, in linkage disequilibrium with rs4362470, respectively
  misc_feature [331]..[331]: n is a, t, c or g
tgtatttttagtagatacgggttttcaccatgttggccaggctggtcttgaactcctgacctcaggtcatctgcctgcttcggcctcccaaagtgctgaaattacaggcatgagccaccatgcccagcccaacccactgttttcctttgcctgttggattctgccaataggatgaaatacagagagaatggagggaagagggatttgcccctttcagcagtagtttccagctccttgtcactttgccacaacctgacccatcaggcccccttaaagggtgcagcaccgctaagtcattcattccttcctcagtgagttctgtccctggccntaattaaaattaatgtcctgactaggaagtgactacccgggaggattaaaagaaatgggcaagtctgatcccaagcaccttctattatcaatgttttctttgccaaaaaaaaaaaaaaaaatgctagcaattcctggccacaattaagtgtcactcacttgggaagagcctggggacagaggccgtactgaccttatacctatgctagaaggaccctatactgacccctcaatgctttaaaatgtcccaaactgacctccctctagccattcctctgccccttccctatggacaagaagcgcatgggcccaagaggatatgtccacctgg

SEQ ID NO: 5358 - DNA, 661 bp, Homo sapiens
  misc_feature [331]..[331]: Chromosome 18, SNP identification no. = rs517221
  misc_feature [331]..[331]: allele = g, in linkage disequilibrium with rs4362470, respectively
  misc_feature [331]..[331]: n is a, t, c or g
atgtccaagctccattcacccccagcctccatcagcatctcttagtagcacctcaggctaaggggtgtgtaacctggaaacccaatccccttttagaaggagaactcagggaagggggcctcatgggcccagaaagcaagctctaggccatctggggagggcattctgttgtcctaggcacttggagcatggtccagaagagagtcccaggctccaggtggacatatcctcttgggcccatgcgcttcttgtccatagggaaggggcagaggaatggctagagggaggtcagtttgggacattttaaagcattgaggggtcagtatagggnccttctagcataggtataaggtcagtacggcctctgtccccaggctcttcccaagtgagtgacacttaattgtggccaggaattgctagcatttttttttttttttttggcaaagaaaacattgataatagaaggtgcttgggatcagacttgcccatttcttttaatcctcccgggtagtcacttcctagtcaggacattaattttaattagggccagggacagaactcactgaggaaggaatgaatgacttagcggtgctgcaccctttaagggggcctgatgggtcaggttgtggcaaagtgacaaggagctggaaactactgctga

SEQ ID NO: 5359 - DNA, 661 bp, Homo sapiens
  misc_feature [331]..[331]: Chromosome 18, SNP identification no. = rs502339
  misc_feature [331]..[331]: allele = g, in linkage disequilibrium with rs4362470, respectively
  misc_feature [331]..[331]: n is a, t, c or g
atgtcccaaactgacctccctctagccattcctctgccccttccctatggacaagaagcgcatgggcccaagaggatatgtccacctggagcctgggactctcttctggaccatgctccaagtgcctaggacaacagaatgccctccccagatggcctagagcttgctttctgggcccatgaggcccccttccctgagttctccttctaaaaggggattgggtttccaggttacacaccccttagcctgaggtgctactaagagatgctgatggaggctgggggtgaatggagcttggacatgcccactgagttgtccatatgcttgcatngggccccactaagcagaacagagtccagtggaaagagaagatggggtgggcaagggacttctttttgtgttcttgccccagcctcacaaagaggctcagagagggcctcacaggaagtgagtaagttccaggccctggatctaaagcaaaggccaacaagatcattaagccgagatctaaggaaatgagctaagagacagaactgcaaggctgggcacagattcaaccaatgaaatgagtgagagttttatgaggctgtattgccagagaaaccttaagctgaacatataggtgcttatgattgtaaaccccaagcaccagaacccatgc

SEQ ID NO: 5360 - DNA, 661 bp, Homo sapiens
  misc_feature [331]..[331]: Chromosome 18, SNP identification no. = rs505060
  misc_feature [331]..[331]: allele = c, in linkage disequilibrium with rs4362470, respectively
  misc_feature [331]..[331]: n is a, t, c or g
cttggacatgcccactgagttgtccatatgcttgcatagggccccactaagcagaacagagtccagtggaaagagaagatggggtgggcaagggacttctttttgtgttcttgccccagcctcacaaagaggctcagagagggcctcacaggaagtgagtaagttccaggccctggatctaaagcaaaggccaacaagatcattaagccgagatctaaggaaatgagctaagagacagaactgcaaggctgggcacagattcaaccaatgaaatgagtgagagttttatgaggctgtattgccagagaaaccttaagctgaacatataggngcttatgattgtaaaccccaagcaccagaacccatgccagaagggagcgggcctcaaggcagggccaccccagcagcaaaatcttcccaggtgctcctcaggagtgtccaaggtgagccctggatgggagaccccagcaacagggaagccatactcactgaccacagactcacccacaaccaggccgtgagtcaagaaacatgtctgcctgcttacttactattcctgacaaacaggacatgctgtactctgtgccaggggctgtcacctcctgttccctttcccctttttaaaaatggaagtttttattatcttgcttctcccccatca

SEQ ID NO: 5361 - DNA, 661 bp, Homo sapiens
  misc_feature [331]..[331]: Chromosome 18, SNP identification no. = rs7506509
  misc_feature [331]..[331]: allele = c, in linkage disequilibrium with rs4362470, respectively
  misc_feature [331]..[331]: n is a, t, c or g
caggcatctagagacactagtaatccaacaaagattgcttcaattcaaagtcaaagcttcaaattttttgagccacccagatgactaaggctagaatccatgtgaagtttaattccagcttagtctgacagtgcagcccttcggggccccaactctgagtgccaagtagtttaccagggtctccaccatggaaaagaaaggaagcagtagattcgaacttatgggcacctagccacccacagttttcaaaaacatggctcatctctctgtcttctctttagatgagccagtgccccctgggcaaaagtagccctaaatgccaagcttgccnctctagagcctcattgtctcctagatcttggcttgcttcctcactatcttattagcttttgatattttagggaattttttttaaatgttttctctgaatttgttagttgttttcagagggaaggttggcccatattagctagtctgcctctattagaagcagaagtctgatatggactttggatagaaatgaggatcagaagtttttaagaacagagggacatggccaggcacggtggctcatgcctgtaatcccaacactttgggaggccaaggcgggtggatcacgaggtcaggagattgaaaccatccttgctaacatggtgaaacc

SEQ ID NO: 5362 - DNA, 661 bp, Homo sapiens
  misc_feature [331]..[331]: Chromosome 18, SNP identification no. = rs1789553
  misc_feature [331]..[331]: allele = t, in linkage disequilibrium with rs4362470, respectively
  misc_feature [331]..[331]: n is a, t, c or g
cgaacttatgggcacctagccacccacagttttcaaaaacatggctcatctctctgtcttctctttagatgagccagtgccccctgggcaaaagtagccctaaatgccaagcttgcctctctagagcctcattgtctcctagatcttggcttgcttcctcactatcttattagcttttgatattttagggaattttttttaaatgttttctctgaatttgttagttgttttcagagggaaggttggcccatattagctagtctgcctctattagaagcagaagtctgatatggactttggatagaaatgaggatcagaagtttttaagaanagagggacatggccaggcacggtggctcatgcctgtaatcccaacactttgggaggccaaggcgggtggatcacgaggtcaggagattgaaaccatccttgctaacatggtgaaaccccgtctctactaaaaatacaaaaaataaaaataaaaaatttagtcgggcatggtggcaggcatctgtagtcccagctactcgggaggctgaggcaggagaatggcatgaacccgggaggggagcttgcagtgagccgagatcatgccactgcactccagcctgggtgacagagtgagactgtctcaaaaaaaaaaaaagagggacataagcag

SEQ ID NO: 5363 - DNA, 661 bp, Homo sapiens
  misc_feature [331]..[331]: Chromosome 18, SNP identification no. = rs2187405
  misc_feature [331]..[331]: allele = g, in linkage disequilibrium with rs4362470, respectively
  misc_feature [331]..[331]: n is a, t, c or g
atatcagccattttattgtgtacaaagaatgctcaggagagcaaatgtgaacatgggaaagcccatacctcaaggcatctggctcagtaaacagtgtgttcaggaaacagcaaaggattaaacaaccgtcagggcatccatagccaggactcttcgtctgtggtctgctgtactccgattccttatgatccccactcctactcctcactcagccctgttcctttacctcttatccaaacacttccataagatttcctatcagtcactgacccctcagtctagtatagctccaagggactagattctcctatctctggttctagagaaaaantttatccttcctaaaatgagttttaggctctgaggcacaggagacggtgagactttgtatagtgcttatgacagtgcttacttgagggaattcttccctggattcctgagattcctgagtattactgccttcttcacagaagcccaaccctgattctttcagatggacttatccctattcctcacatccaagcagtatcagatccgagaggctaaataacttgttctgggccagggaactaagtgcccaaaacagtagttcaatccagacctgctccaccctagagacggagactgtaatactcctaaactagaggaatgggaagtagca

SEQ ID NO: 5364 - DNA, 661 bp, Homo sapiens
  misc_feature [331]..[331]: Chromosome 18, SNP identification no. = rs539249
  misc_feature [331]..[331]: allele = c, in linkage disequilibrium with rs4362470, respectively
  misc_feature [331]..[331]: n is a, t, c or g
taacctgaagaggctgttatttcagtgagggtatgagcaaaaacggaaatgcgctcatgctagaaatgcacacacaaacacatccacagccagatcaaaagcatgggattcctcccttaatagacctcctaaaataaatttagatgcatcaagctggcagatggagatgggaaaggggcctccccaagaagtcaagttctgctaaagctgcagtgcctaataaggtattatcttgcctctctgatcatttaagttagaaaagggaggcaataacaagaggaagttgtatggtttctcagtgtttatatctgagtgaaaagaaagaaccaancagagtcatgaaagtgacatccttgggaggcagtgatttctcccctgctgttgaaagtggattttatttatttatttatttttgagatggagtcccactctgtcacccaggctggagtacagtggcgcgatctcggctcattgcaacctccacctcctgggttcaagcaattctcttgcctcagcctcccaagtagctgggattacaggcatatgccaccacaccgggctaatttctgtatttttagtagagactgggttttaccatgttggccaggctggtctcgaactcctgacctcaagtgagtcagcctcccaaagtgctaggatt

SEQ ID NO: 5365 - DNA, 661 bp, Homo sapiens
  misc_feature [331]..[331]: Chromosome 18, SNP identification no. = rs7241939
  misc_feature [331]..[331]: allele = a, in linkage disequilibrium with rs4362470, respectively
  misc_feature [331]..[331]: n is a, t, c or g
gggctgggttccatgcaatggaatacaggaggaagtaacagagaacacaaaaaatcccttgagtaggtgtcctctctcttgctccgtcttcctcttctgaagtgactgtgggagtcacatgttgaagatccatcacaaatggaagggatctgagtccccacctcattgctcgggattgactgtcccacacatggtaagactgattgaaaactaagcctctcttgtgctggctactgaggctttggagttgcttgttaccttaagtagtactcattcctgtattacagaaatgcaataaagatctcacaaagagaatctagtagacaatacnttattggctgagtgtttgtgtaccacctccaaattcatatgttaaagcaccaaccccaagtgtaatggcagcaggagacggggcctttgagaggtgattagggtcatatgaggccacaagggtgaggccttcatgattagattaatgtctttataagaagaagaagagataccagagcattcatgagctctctcactccctcactcactttctccctctttctctcactcttcctttgtctccgctatgtgaggacacagcaagaaggtggccatctgcaaaccaagaagagagccctcaccagaaactgaaattgccagcaccttgatc

SEQ ID NO: 5366 - DNA, 661 bp, Homo sapiens
  misc_feature [331]..[331]: Chromosome 18, SNP identification no. = rs8083889
  misc_feature [331]..[331]: allele = t, in linkage disequilibrium with rs4362470, respectively
  misc_feature [331]..[331]: n is a, t, c or g
acacagcaagaaggtggccatctgcaaaccaagaagagagccctcaccagaaactgaaattgccagcaccttgatcttggacatcccagcctccagaatggtgagaaataaatttctgatatttaatccaccgagtctgtagtgttttgtaatgacaaaccaagcagactaagacatgatgtatatgaaatagcagagaaggtcttcataactaagactgagaactagaagctattttttaaaaaaaaagataggcatattttgactgttaaaaattacaaggaaaacaagaaaattttgtacagtaaaagattccataaacaaactatanttgtcccttagtctacgcaggggattggtttcaggaccccctcttataccaaaagtcagtcctgcagaactggcatatatgaaaagttggccctttgtatatggaatttttgcattccataagtactgtattttcaatccacttttggttgaaaaaaatctacatataagtggagccatgcagttaaaacccatattattcaagggtcaactttacagtaatgcagttgcccaaaggaaaatatttataatacagatgatataaagttagttcttaaaacatgcaaacagctcttacaagtgtgacaagaaaaagacaatcatcacaaag

SEQ ID NO: 5367 - DNA, 661 bp, Homo sapiens
  misc_feature [331]..[331]: Chromosome 18, SNP identification no. = rs4890592
  misc_feature [331]..[331]: allele = a, in linkage disequilibrium with rs4362470, respectively
  misc_feature [331]..[331]: n is a, t, c or g
ccccatctctactaagaatacaaaaattagcagggcgaggtggcaggcacctgtaatcccagctacttcagaggctgaggcaggagaattgcttaaaccctggaggcagaggttgcagtgagccaagattgcgccactgcactctagcttgggtgacagagcaagactccatctcaaaaaaacaaacgaacaaaacaaaacaaaacaaaaactgtatgccctttggcctaacaattccacttctgggaatccatcttataaaaataaaattgccagtacatgaggatatatgcgtgagggtgtttcttacaggattgttcatagggggggnaaatgaaaacaaatgaaattaccattaatagagacatagctaaataaatgtgggtatacccacaccatgaaatattatgccattatttaaaagaatgaataagataacaaatggcttaaagaagtcttcagcaaacatcgttgagtaagaaaagcaaacgacagtcaaatgttcataactcaatccattttaataagttaatcacctcaaaatgctgtatatgtaaatgtttgtatgtacatatatatgcatgtattatatgcatacatatctgttacatatatacacacgtatatggcatgaagaaatatggcagagtgaatagttgta

SEQ ID NO: 5368 - DNA, 661 bp, Homo sapiens
  misc_feature [331]..[331]: Chromosome 18, SNP identification no. = rs1944340
  misc_feature [331]..[331]: allele = c, in linkage disequilibrium with rs4362470, respectively
  misc_feature [331]..[331]: n is a, t, c or g
ttctgttgtggttttggccctaacatttgggtcacctgctacagagatggaggccaacaggtggccgctcaaggctgtgccgctggaaggacaggtcttgttatgcttctgatgtaggcagagactttccaaaactttccaaaatttctgtcccaatgacctggtctaggctgcagggccctcaggactgggtttccctgaattgagatagtgcagctactctactgctctgaaaaacaagacattttcaacttaatatccttggatatctaacctcccacaaacataaatttaatagctgcaaaaatatgattgtatatatactcatctntgtgcaatttccccccctttattgttttttgatttgctctttattcctccttttttcccttcctcttgtaacagctggtctgtgtcttgcctgctgcctagacagagctgacttatcaagacaggggaattgcaatagagaaagagtaattcacacagaaagcgggctgtggaggagattggagtttttttattattcaaatcagtctccccaaacatttggaaatcagagtttttaaggataatttggtgggtggaggaagtcctgtgagtcgagagtgctgactggttgggttggagatgaaatcatgggaagttgaaggtgtcctct

SEQ ID NO: 5369 - DNA, 661 bp, Homo sapiens
  misc_feature [331]..[331]: Chromosome 18, SNP identification no. = rs4362470
  misc_feature [331]..[331]: allele = a, g
  misc_feature [331]..[331]: n is a, t, c or g
gaatgttgcaatctatcagggttgcattactcatgcaaagattactcatgtaaaacactcagaaagaagttgaaatttactacagatttgttgattctcttatgattgttaatcgtgtcattgttttggggacaggctcaggagactgggcctgatgggaggtcagggagatgtgtgactttccttgtgatcacagcaacagaagggtttttccagcttgcaaatgacctctcaaaataacctgaatttccacccagggctggtgggaatgtaagctgatacaaacttcggggaaataatgaggtggaagatagtaactggcttaagaacntaaagggcagaggagtggaggttgagactcagcgtcctaggattaagagaaacctgtcctggtcatcccactcctgaaagtctgtcctaaaggacttctacaccaaaatggtcatttcagatttacttatagtaacttaaaagtaaggtagagttggaaacaactcaaatatgcaaaaagtaagcaaatttgttaagcaaaataagcatatacttttggcaggttgtcatgtagccattgaaaatgatggttacagagtttttgtttttgtttttgtttttaataattattatactttaagttttagggtaccgtgcagttttgttacat

SEQ ID NO: 5370 - DNA, 661 bp, Homo sapiens
  misc_feature [331]..[331]: Chromosome 18, SNP identification no. = rs11659608
  misc_feature [331]..[331]: allele = g, in linkage disequilibrium with rs4362470, respectively
  misc_feature [331]..[331]: n is a, t, c or g
gttcctttggaggaggagaggcactctgatttttagtttctggtttttctgctctgtttttttcccatctttgtggttttatctacctttggtctttgatgatggtgacgtacagatgggtttttggtgtggatgtcctttctgtttgttaattttccttctaacagtcaggaccctcagctgcaggtctgttggagtttgctggacgtccactccagaccctgtttgcctgggtatcagcagcggtggctgcagaacagcagatattggagaaccgcaaatgctgctgcctgatccttcctctggaagttttgtctcagaggtgcacccngtcatgtgaagtgtcagtccgcccctactggggggtgcctcccagttaggctactcaggggtcagggacccacttgaggaggcagtctgcctgttctcagatctcaagctgcgtgctgggagaacgactactctcttcaaagctgtcagacagggacatttaagtctgcagaggttactgctgacttttgtttgtatgtgccctgcccccagaggtgcagcctgcagagtcaggcaggcctccttgagctgtgttgggctccacccagttcgagtttcccggccgctttgttcacctactcaagcctcagcaatggcgggtgaccctcag

SEQ ID NO: 5371 - DNA, 661 bp, Homo sapiens
  misc_feature [331]..[331]: Chromosome 18, SNP identification no. = rs559774
  misc_feature [331]..[331]: allele = g, in linkage disequilibrium with rs4362470, respectively
  misc_feature [331]..[331]: n is a, t, c or g
tggctggggaggaaaaaactaaaaatcaaaaagtcaaaaattaaaacaaaagctggttttattgatcgataactgcacatttttggttggaggtgccagctcttgacgaatttgcagccctctcactctcgatattggagcttcttcctcctgtgctgtcttctctgcctggggaaatttgtgtccctcagctaggccacccaggggaatcacatgatgatcctgaacattccatcccatcaggctgtgcacaggactggctgcatctgagatcaaacgatgttcaaagaaagttcagactccagcactccagttagggcaagcctcttanaaggtgagcgtcttgatacctgtttggaaggagggaacactggttgcaggaaattcaggtgagcatttttgaaagaggtggtgtatagactccaaagcatcttcctcctactttcttaaatttttttgttttgtgtgtttgggtttttgtgttttgaatggggggttgtttttcggtttttttgagatggagtctcgctttgtcacccaggctggagtgcagtggtacgatctcagctcactgcaacctctgcctcctgggttcaagcagttctcctgccttagcctcccaagtagctgggattacaggtgcgtgctaccacacctggct

SEQ ID NO: 5372 - DNA, 661 bp, Homo sapiens
  misc_feature [331]..[331]: Chromosome 18, SNP identification no. = rs4890594
  misc_feature [331]..[331]: allele = g, in linkage disequilibrium with rs4362470, respectively
  misc_feature [331]..[331]: n is a, t, c or g
gggattacaggtgcgtgctaccacacctggctaatttttgtatttttagtagagacaaggttcactacgttggccaggctgttcttgaactcctgacctcaagtgatctgcccacttcagcctcccaaagtgctaggattacaggcgtgagccaccacatccggccctgtgtgtttgttttttgagacagggtctcactatgttgtccaggctggtctcgaactcctgagctcaagcaatcctcctcccttggccttcccagtaattggcttttaaacatttgatggagggtgctggtgagcaaaacttgacagttatgaaacaggaaacnagcaggaaaaggacctgcccaaacttggaggagaaggtagtgccagggaagaagggatggcactgagcttagtgtgcaacccagaatttgtgacaattgcacaacacaccctcttgtcattcctgtcagttttattcattcccctccctcccttccattcctttcccagtctttaatccccctgttccttcccttctcctactcccttaatcacttacagtcccactcccaggaggaaggggtacaggaaactgcatttctcctcctgaaggtcactgtgtgcagctgaagccacttagtccacaggaaggaaggccagctggtaggagt

SEQ ID NO: 5373 - DNA, 661 bp, Homo sapiens
  misc_feature [331]..[331]: Chromosome 18, SNP identification no. = rs4890302
  misc_feature [331]..[331]: allele = a, in linkage disequilibrium with rs4362470, respectively
  misc_feature [331]..[331]: n is a, t, c or g
agtagagacaaggttcactacgttggccaggctgttcttgaactcctgacctcaagtgatctgcccacttcagcctcccaaagtgctaggattacaggcgtgagccaccacatccggccctgtgtgtttgttttttgagacagggtctcactatgttgtccaggctggtctcgaactcctgagctcaagcaatcctcctcccttggccttcccagtaattggcttttaaacatttgatggagggtgctggtgagcaaaacttgacagttatgaaacaggaaaccagcaggaaaaggacctgcccaaacttggaggagaaggtagtgccagngaagaagggatggcactgagcttagtgtgcaacccagaatttgtgacaattgcacaacacaccctcttgtcattcctgtcagttttattcattcccctccctcccttccattcctttcccagtctttaatccccctgttccttcccttctcctactcccttaatcacttacagtcccactcccaggaggaaggggtacaggaaactgcatttctcctcctgaaggtcactgtgtgcagctgaagccacttagtccacaggaaggaaggccagctggtaggagttcagatggcagttacagccaccaggggacagctttggcatccacccc

SEQ ID NO: 5374 - DNA, 661 bp, Homo sapiens
  misc_feature [331]..[331]: Chromosome 18, SNP identification no. = rs6507645
  misc_feature [331]..[331]: allele = c, in linkage disequilibrium with rs4362470, respectively
  misc_feature [331]..[331]: n is a, t, c or g
gaaaaggacctgcccaaacttggaggagaaggtagtgccagggaagaagggatggcactgagcttagtgtgcaacccagaatttgtgacaattgcacaacacaccctcttgtcattcctgtcagttttattcattcccctccctcccttccattcctttcccagtctttaatccccctgttccttcccttctcctactcccttaatcacttacagtcccactcccaggaggaaggggtacaggaaactgcatttctcctcctgaaggtcactgtgtgcagctgaagccacttagtccacaggaaggaaggccagctggtaggagttcaganggcagttacagccaccaggggacagctttggcatccacccccttcagggctctcctgagagggaggagcagtgcccaccctagggagggctgagctttatcacactctctgagggctctctgggtcctgcctcatcagctctgatggcggaagggttgacagggggcagcaaggatggttttgtcctgtggcacctcaccctgcagtgtccactccctcctacccccagctcttcctgccttgcctcctgttccctgtgatcctcccttggtggagtgctgatgtgatggagtggcccttccttggagactccccacaacaatccaagtc

SEQ ID NO: 5375 - DNA, 661 bp, Homo sapiens
  misc_feature [331]..[331]: Chromosome 18, SNP identification no. = rs7237600
  misc_feature [331]..[331]: allele = g, in linkage disequilibrium with rs4362470, respectively
  misc_feature [331]..[331]: n is a, t, c or g
caaaaacaaaaaacaaaaaaaaaagtctctggtcctttccagctacatccaaacttccaaccccaccccagtgcccagagaagggaggaggtggggactaagcccaacagggcccacttgtgcccaatacctttccccacactgtcctactgcctctcctcaccttctgccccaccctcactctgcatgactgaatgacttaattcaaattgcatttatttgctcatttctaatcacatcctaggatctcatgctctcttgatggtaaataaaagtgaacagaaaatgtcttctaatgacctggtaaatcaagtttatacctttcccaaancagggtcaatttgctctaaatctagtcaagtcagaacccagcattagtaggtggcctgaccacatggccccttcccccagtctcttaaggcatagtgagtcactcacagaggccagcttagcccttcatgagtcagtatctcctgtttatgtacagagtcattactttctctataggaaaaaaaggaggtggtggtggaggtgcttgtctatagatggactgggcattgtaatttgaaaagcattgagaaaagtccctatctccaaagacattatcagccttacataatatctgaaaacctatcatttgagacatttctcagagcaatga

SEQ ID NO: 5376 - DNA, 661 bp, Homo sapiens
  misc_feature [331]..[331]: Chromosome 18, SNP identification no. = rs6507646
  misc_feature [331]..[331]: allele = a, in linkage disequilibrium with rs4362470, respectively
  misc_feature [331]..[331]: n is a, t, c or g
gggaagttaacacttggaagaaagggttagtaggaggttattctcctgtttttaccacttttggcctgatggtcagctgcagtcactgtcctgaggggcagctaaaactgagaagaaactcaccatctttctggcctgaagaactggcagacagagtttgagggcaaccccagctgctagaaagtgagggagaatcctcaaagggagagagccagagaaagaaaatcccaaattccatgtataaagtctgccccaatttttgcctgacccccaaacacccatgtacagcagagattgtaagcaccctatctaagggtgaaagaacaaaaancagatatgaggggccactcagaaaaaaacagaatttgcagtttgaaccataacaagttaatttctcattaaaatgaaaaattcaaaactctttgaaagaatacaactgaatccagtctccacaatatgacattcacaatatccagagtacaatccaaaatttcttgacatattgagagacaggaagatgtgatgtattctcaagagtaaatataataggcaaaagtcaagctcaagatgacacagatattgaaattaatagaaatttattttaaaatggcaattcttactatactaaatgacataaggaaaaatgtgcttataatgatta

SEQ ID NO: 5377 - DNA, 661 bp, Homo sapiens
  misc_feature [331]..[331]: Chromosome 18, SNP identification no. = rs11082479
  misc_feature [331]..[331]: allele = t, in linkage disequilibrium with rs4362470, respectively
  misc_feature [331]..[331]: n is a, t, c or g
tgatgtattctcaagagtaaatataataggcaaaagtcaagctcaagatgacacagatattgaaattaatagaaatttattttaaaatggcaattcttactatactaaatgacataaggaaaaatgtgcttataatgattaaaacatagttagtatcatcacctaaatagagacgcctaaaattataatcaaatggaaattctataactaaaaaatacagtatctaattttaaaaaattaactggatggggcttaacataattttttaaaacagatgaaagagtaggtgaatctaaagagagatcaacagaaaatatccaatctgaaaganagagataaaaatgatagtacctaaagggtggtattgaaaggtctaacatacctacaattgaactcctagaagaacagaggacatggggtagaaaaaaattatttgaataaataatggccaaaaagtccccaaatttggcaaaagacataaatttacaaatctaagaagctcagcaaatcccaatcaagttaaataaaagaaaaacatgcctgggcacattagagtcaaatgaatggcaaagtgtcaaaagcatgcagagaaaaacagcacattacacagaggagaataatgagtcaaatgactgttgatttcttatatcagaagcaatgg

SEQ ID NO: 5378 - DNA, 661 bp, Homo sapiens
  misc_feature [331]..[331]: Chromosome 18, SNP identification no. = rs484914
  misc_feature [331]..[331]: allele = c, in linkage disequilibrium with rs4362470, respectively
  misc_feature [331]..[331]: n is a, t, c or g
attcacagcatatctttaaatcttacttttgtttttaagccattacaacaagctctgctatttctttttttttagctaattggaaatttttgcctattaacatttaatattattctgattatattttgatacaccattttatttgttttcttttttgcccctctgatttttgttcttctgttacttctttcttgtctttttttttttttttacagaagctctttattttgtttaaattttagatttacataaaagttgcaaaaatagtacagagagttcctgtatacctctcacccagtttctgctgaagttaacatcttacattatcacngtacattcatcacaactaagaaactaacattagtacactactattaattaagtgccagactttattcagatttctttgtttcttcacaaataacccctttttcctgtttcaggagccaatctagggtaccatattgcatttagtgccttttagaaattattatttggacatgttttagaattccagtttaatttacatattaatgttttttctatatattattgtagtttttacccaatgtccgctctaagaatcacgatatacattcttaactttttataatctgatttgagtttacattgtcccactttgcataaaatatgcaaacct

SEQ ID NO: 5379 - DNA, 661 bp, Homo sapiens
  misc_feature [331]..[331]: Chromosome 18, SNP identification no. = rs12326731
  misc_feature [331]..[331]: allele = c, in linkage disequilibrium with rs4362470, respectively
  misc_feature [331]..[331]: n is a, t, c or g
catgcctagccctgcccccacacaatggtccttccctatccaccctggtaattgaagacaaagggcatatactcttgggagttctagggccctgcccaccacctgttcttccccatactactgcagctgatgctctctggaaagcgccacctcctggcaggaggccaaccagcacaaaaatactacattaaaccaccaaagctaagaaccctcacagagtccatttcacctccctgccacctccactagaacaggtgctggtatccacagctgagagacccacagacggttcacatcacaggactctgtgcagaaaactcccaataccagnccagagcctggtagacttactgggtggcaaggtcctaaagagagaaaacaatcactacagctcggctctcaggaagccacatccataggaaaagggagagagttctacatcaagggaacaccctgtgggacaaaaaaaatctgaacaacagacttcagccgtagaccttccctctgacagaacctacccaaatgagaaggaaccagaaaaccaactctggtaatatggcaaaacaaggttaatacctccaaaagaatcacactagctcatcagcaatggattcaaaccaagaagaaatccctgatttacctgaaaaagaattcaggaggt

SEQ ID NO: 5380 - DNA, 661 bp, Homo sapiens
  misc_feature [331]..[331]: Chromosome 18, SNP identification no. = rs11082484
  misc_feature [331]..[331]: allele = a, in linkage disequilibrium with rs4362470, respectively
  misc_feature [331]..[331]: n is a, t, c or g
gactcacataaacttaaggtaaaggggtggaaaaagacatttcatgcaaattgacaccaaaagtgagcaggagtagctattcaaacaaactttaaagtgacagcagtttaaaaagacagaaggacattatttaatgataaaaggccttgtccaacaggaaaatatcacaatcctaaatatatatgcatctaacactggagctcccaaatttataaaacaattactagacctaaaaagtgagatagacagcaacacaataatagtgggggacttcaatactacactaacaggattagagaggtcatcaaggcagaaaggcaacaaaaaaaantgaattaaactataccctagaacaaatggaattaacagatatatacagaacattccatctaacaactgcagactatacattctattcaacagcacatggaaccttctccaagatagaccatatgataggccacaaaatgagcctcaataaagttaagaaaatggaaatcatatcaagcactctctcagaccacagtggaataaaactggaaatcaactccaaaaggaaccttcaaaaccatgcaaatacatggaaattaaataacctgttcctgaatgatcattgggtcagaagtgaaatcaagatgaaaattaaaaagttctttgaact

SEQ ID NO: 5381 - DNA, 661 bp, Homo sapiens
  misc_feature [331]..[331]: Chromosome 18, SNP identification no. = rs1789557
  misc_feature [331]..[331]: allele = c, in linkage disequilibrium with rs4362470, respectively
  misc_feature [331]..[331]: n is a, t, c or g
gtgggcgtccttatcttgtttcagttctcagagggaatgctttcaactttttcccattcagtattatattggctgtgggcttgtcatagatggcctttattacattgaggtatgtctcttgtatgccaatattgctgagagttttaattataaagggatactggattttgtcaaacgctttttctgcatctattgagatgattatgtgatttttgtttttaattctgtttatgtgttgtatcacatttattgacttgcatatgttaaaccatccctacatccctgctatgaaatccacttgatcatggatcatggagtattatcttttttnttgttgttgttagacagagtcccactctgtcacctaggctagggtgcagtggcactatttcggctcactgcaacctccgcctcccaggttcaagtgattctcctgtctcagcttcctgagtagctgggattacaggtgtgcgccacaatgcctggctaatttttgtatttttagtagagacagggttttgccatgttagccaggctagccttgggtgatccacccacctgggtctcccaaagtgctgggattacaagcatgagctactgagcccggccggattatctttttgatatgttgttggctttggttagctagtattttgttaaa

SEQ ID NO: 5382 - DNA, 661 bp, Homo sapiens
  misc_feature [331]..[331]: Chromosome 18, SNP identification no. = rs504030
  misc_feature [331]..[331]: allele = g, in linkage disequilibrium with rs4362470, respectively
  misc_feature [331]..[331]: n is a, t, c or g
taggcagataattcaatttctcaggattttggtcacatcatttcaagaaagtagggtttggcctactgactctctagggacccttcaacctctaacactttatgattctttgatgagtcacagatatcatgcacttttctctttatccctaaatatttcaggttctaactttctcttacataataactgtatagttatcaaatttacagaatttaacatgtatgcattattacataatttgcattccatatacaaaatctgccaactgtcccatggtgttctttagaggaatttttacttcttatctcaagatccaatccaggatcaaatngatcccatgttgcatttagttatgtagtctctttagtcttctttaatctagaacatttctcgagcctttatctctcatgaattaacattttggaagagtacaagctagttgtcttgcagaatgcccttcaactgggtttgtctcgtccttcctcatgattagtgtatgttacctgtcccctctggaataccataaaagtgatgttgtgtccttttcagtgcctcgcatcaggaaacacatggtatctgtctggcttgttattggtgatgttgattttgattatttggttaaggtgatgtcttccaggttcctttggtttataattataat

SEQ ID NO: 5383 - DNA, 661 bp, Homo sapiens
  misc_feature [331]..[331]: Chromosome 18, SNP identification no. = rs573463
  misc_feature [331]..[331]: allele = c, in linkage disequilibrium with rs4362470, respectively
  misc_feature [331]..[331]: n is a, t, c or g
gaggggacaggtaacatacactaatcatgaggaaggacgagacaaacccagttgaagggcattctgcaagacaactagcttgtactcttccaaaatgttaattcatgagagataaaggctcgagaaatgttctagattaaagaagactaaagagactacataactaaatgcaacatgggatcaatttgatcctggattggatcttgagataagaagtaaaaattcctctaaagaacaccatgggacagttggcagattttgtatatggaatgcaaattatgtaataatgcatacatgttaaattctgtaaatttgataactatacagttantatgtaagagaaagttagaacctgaaatatttagggataaagagaaaagtgcatgatatctgtgactcatcaaagaatcataaagtgttagaggttgaagggtccctagagagtcagtaggccaaaccctactttcttgaaatgatgtgaccaaaatcctgagaaattgaattatctgcctaagaccacacatccagccaggagttgagcccaagactctctggccaggtgtttacagtgagtgcatgatattggttgttcttgttcatcatgggtcaatgctcaaatacattgttatccattaactacaagccaatatacacccccaca

SEQ ID NO: 5384 - DNA, 661 bp, Homo sapiens
  misc_feature [331]..[331]: Chromosome 18, SNP identification no. = rs538405
  misc_feature [331]..[331]: allele = c, in linkage disequilibrium with rs4362470, respectively
  misc_feature [331]..[331]: n is a, t, c or g
tcatcctgaaaacaacatatttcagaaaaaacaacgtgagttcaagagttagacagaagataatagtggaaaatagatacctgtgagaggctgattcaagcattttagaaacaattggtgaactaattaacacacctatcttctattaattaatgtgcatcctctgaggacctgggcaagtcttcattgttggtttagttgttttgagaagcaacacaattgctttttaaaatacaattatataatttagatatctatatattttctgcattctcagtgctccctaaatcctcaccccaacttcttctcactccccagctgtgtttccttnctggccttgaacttctcagctgctgaacttttttcctcctctcagtacttcaacaatttcccttaaagggacgcttcagatcaatgaaacaaagagagtttataaatagcctgccaagcagagggaaacatagcataagatatttcaaattattggaaagaagtggattatttaataattggtactgggaaaactatttgaataaaaacaaagctacatattcttctcaattcttaatccatattccagatgagcaattaattaaaggtaaaaattgaaaccataaacatgcaagaagaaaacataggtgatatttaaatgagtcatgaa

SEQ ID NO: 5385 - DNA, 661 bp, Homo sapiens
  CD33L3
  misc_feature [331]..[331]: Chromosome 18, SNP identification no. = rs495078
  misc_feature [331]..[331]: allele = c, in linkage disequilibrium with rs4362470, respectively
  misc_feature [331]..[331]: n is a, t, c or g
ctcctggccctccaggtgtcacaatgccggaagtgccacccccggagccacactcctggagcaccctgttagcatgcccaggtgccctcaaggagggtagcccctcccagattgttgggctcctcatactggccactcgtcagctggtaatgtcagccatgtggtggtggcaggggcacaaaagatgcctgagggactccagctctgagggccacaatgctgtccctcctggaggcgtggtcttcctatggtgactgcccacttggttccatccttcccttaccccctcaaaatccgtgtcacataaagcccaccccagcagacctaattnttgttaaagtgccattctgtaagggcaccccctctggccattattccaccacgactaccacgggactcactttcctgtctgtgacaccctggagagggtctttaattccaggcattagtaaaacatccacagagagcaagtgacccgtgctccgccatgaaaccgacaagcagctcagctttctctctagttaacagaagcgtgactacgcccacagaagatctacacagaggttcccgtgcaaattcctgctttgcttttttccttaccaaggaactggtggagattttggtcagctgtggcaaaaccaaggtttctgtttctgaccct

SEQ ID NO: 5386 - DNA, 661 bp, Homo sapiens
  misc_feature [331]..[331]: Chromosome 18, SNP identification no. = rs1506218
  misc_feature [331]..[331]: allele = g, in linkage disequilibrium with rs11151137, respectively
  misc_feature [331]..[331]: n is a, t, c or g
cttttattggtttcttgtactgggtagaagctacagtttgaatacaagtgacgagagtaaagatccttgtcatattcctgatcataaagacagtttttcactatcaaatataataaaattgtaagttttacatagatttgctttatcagattgaggaagtgatcttctagtcctggttttataaggacttagttctcctctagttctatcttgatgaaattttattgagaagtgatttcaatgttgtcaattcctttttctgtatctattgataaagtcatgaagtttttattcttgtagttaatattgtatattacattttatactgttnaattgttaatgcagccttacatacttgagataaaattcatgttacgattttaaataatgtatggttggattccatttgataaaattttgttaagaatgtttgcatttatattcatgattgatgtcagtttgtagttttctttctgttaaaatgtgtttgttgtgttgtagtatccgaattgtggtaccagaattggcactgtagactgaagtagtaaagaccagattttttggttttcttttcttttctttttgttagcaggtttttttaaactgcaagtataatttttaaaatagatatagagatattaaggttatctatttcttcttg

SEQ ID NO: 5387 - DNA, 661 bp, Homo sapiens
  misc_feature [331]..[331]: Chromosome 18, SNP identification no. = rs17073435
  misc_feature [331]..[331]: allele = a, in linkage disequilibrium with rs11151137, respectively
  misc_feature [331]..[331]: n is a, t, c or g
cactctggggggtctattctcagatatctttgttatcagtctctaatacatttgctactaaattacaacagagagaattatagttgtcatttggtaaaatattaaagaaatttaaggtaagaggcaatgctgctggcaattctttttatagttaggagaggagtaaacaaaacaaaacaaaaaactccctacattgtccccaaatgtatcacagcacttccttttatctgaaattacccaccaggcaagcaaacaagagatcatgggagatgtagctgtctgtgtttaagagatgggcagagcaaggctgaacagagcaaatagacaaacnactggcatgttgaaggagatccagcattcctgtgggtaatgtctcctgttgtcaccagtatatagcataaagacatttgccacctgccagctgcacgcctggatgacccctgaggacggagctcattattttgtctgtcttagtttatttagggcctgattatcttacctagatgaaatctggcttcctctcagcccatctcattccgtgttatattctaaatcctcttgtaaggaaataaatcttgccaaactggtatctaaagcatattcatgagcccttcaatcaacatgtacaccccagaggtttgaggaagctctgtctcaaaac

SEQ ID NO: 5388 - DNA, 661 bp, Homo sapiens
  misc_feature [331]..[331]: Chromosome 18, SNP identification no. = rs8099766
  misc_feature [331]..[331]: allele = t, in linkage disequilibrium with rs11151137, respectively
  misc_feature [331]..[331]: n is a, t, c or g
atgcccaccaccatgcccagctaatttttgtatttttagtacagaaggggtttcaccatgttggccaggctggtctcgaattcctgacctaataacatttttcccacagcttattttgttgtaagaatgtagtatataatacatatagcataccaaatatgtgttaatcaacttcttatgttattggtaaggattctgctcaacagtaggctattggtagttaagcttttggggagtcaaaatttataggataattttctactgtttgaagagtcagcactcctaacccccacattgttcaagagtcaatgcttataggttccatgaacantcactcaaattttcaacagatttttttctacttttcctttatggaacttgaaaacatgactgaaatttatatggacttacaaatgactgaaagatagctaagatactctgaaaaaaaaaacagacaaatttttcaacagccagatattaaaaattgttaaaaagctatagtaattaaataagtgacttaaatgaaagataaaatacactagagtctagacacaggcccatatatacatagtcatttataacaagtgtgctacagtagtttcaaatagaatagtgggaaagattgtctttactgcggtttccaacaaattaaaatccataa

SEQ ID NO: 5389 - DNA, 661 bp, Homo sapiens
  misc_feature [331]..[331]: Chromosome 18, SNP identification no. = rs8087195
  misc_feature [331]..[331]: allele = a, in linkage disequilibrium with rs11151137, respectively
  misc_feature [331]..[331]: n is a, t, c or g
cagtggcaacccacttgggtccccttccacgctgtggaagctttgttcttttgctcttcacaataaatgtagctgctgctcactctttgggtctgcaccacctttaagagctgtaacacttgccttcgtggcttcactcctgaagtcagcgagaccgcaaacccactggcaggaagaaactccagacacatctgaacatctgaaggaacaaattccagacacacctgtaacactcaacgcgaatgtctgcggcttcattcctgaagtcagtgagaccaagaacccaccagacagaataaattccggacacagtaagacaaacttcttcttntaattcaatgtactttaataattccttgctcttggccataggctaacaacatggtacaagcctagatataatttagtttcgtacccatggcataaacaagaatctgacaaaaatgttcaatgaatgactttgaagtgtttgttaaagtgagtatcatagggtctttaatgctatttatctcactgagctttggagcataatattaatatacgtcacattgccttttgtcactcagtgcgggatttagaaactcctcaaaacaatcggaatttgaaacttaaaggactatttaaaaaaaatttttttttagtatattctgtatgtagttat

SEQ ID NO: 5390 - DNA, 661 bp, Homo sapiens
  misc_feature [331]..[331]: Chromosome 18, SNP identification no. = rs8087694
  misc_feature [331]..[331]: allele = g, in linkage disequilibrium with rs11151137, respectively
  misc_feature [331]..[331]: n is a, t, c or g
tgctcactctttgggtctgcaccacctttaagagctgtaacacttgccttcgtggcttcactcctgaagtcagcgagaccgcaaacccactggcaggaagaaactccagacacatctgaacatctgaaggaacaaattccagacacacctgtaacactcaacgcgaatgtctgcggcttcattcctgaagtcagtgagaccaagaacccaccagacagaataaattccggacacagtaagacaaacttcttcttataattcaatgtactttaataattccttgctcttggccataggctaacaacatggtacaagcctagatataatttantttcgtacccatggcataaacaagaatctgacaaaaatgttcaatgaatgactttgaagtgtttgttaaagtgagtatcatagggtctttaatgctatttatctcactgagctttggagcataatattaatatacgtcacattgccttttgtcactcagtgcgggatttagaaactcctcaaaacaatcggaatttgaaacttaaaggactatttaaaaaaaatttttttttagtatattctgtatgtagttatattttattcaattttgttgttgttgttgtggcaggatctcactctgttgcccagcctggaatgtagtgacacaatc

SEQ ID NO: 5391 - DNA, 661 bp, Homo sapiens
  misc_feature [331]..[331]: Chromosome 18, SNP identification no. = rs17073507
  misc_feature [331]..[331]: allele = t, in linkage disequilibrium with rs11151137, respectively
  misc_feature [331]..[331]: n is a, t, c or g
aacttaagcacattctttagctgaagttctttagggtaattgttatatgattgacatgcatagcacccacccacgctggtgtcttcaaacaggcttgccaagtaggactcacttggttctggcaaagccccagtagttgcatcctagaaacgcagatctcttttgaaatactgggcaatttcccccaccagatgctggaaaagatgcttctatctgatgttaaggagcattatggcactaagcattaaggtgagatgtctgcaccactcaatagaaggtcacctttgcaagcagcttttatatctagtcgcttcctggttgctttaacctnttgccagtgatatgtttcttcacaattcattacttagctacttctctttgggctgcaactcagctagtaaggcagctcttttgctctagggagcaaaagcaacaggaagagtccggtgaaagcaaggaagtattgagcactgcatgcaaatagaccacctgcaggcagaaggcatcctaggcttagcctgcttgaaataaactaaccaaacataaccatccatcaacagcaaagtcaatgttcagaatacttacacagctgctcatgctacctaattttaaacattttaaattgagcaaatattgcttaaaagatgaaaacatggaatat

SEQ ID NO: 5392 - DNA, 661 bp, Homo sapiens
  misc_feature [331]..[331]: Chromosome 18, SNP identification no. = rs11151137
  misc_feature [331]..[331]: allele = a, g
  misc_feature [331]..[331]: n is a, t, c or g
ggggtctctgtatgttgcctaggctggcctcaaactcctgggctcaagtgatcctcccacctcagcctcctgagtagctgagactacaagtatgggccactgcacttggctcctgttttattatatcagttgaaatgtaattttatatctgttgatctactaagcattcgaatttgtgttaaacaaaataatatgataattaaatatttaggatctccacactggatttgtgacagagaggtattaattttaaagtagatttgttaccattgaagtatgaatgactgtattctcacatgcattcacaaacttaccaacttttatctgtgcntactgtattagtagatcctctgattaaaataaaaaataagatattaaccttttattgccatggtgtttctgtcttgcggaatttatcatgacttctatattaaagaacctgtttggtaatatttaaaccaaacctaaaaccagttctctctgttggaatcaattttccatataaggcttgttttcagacaagaaaatgtattttgttgtttccggcaggggtgaaaatacaaaactctgctggtgtagctacattttattcctgatttattgcggccatatttagatgtctcgtcacctggctgtggactagcttatctcctcttgccac

SEQ ID NO: 5393 - DNA, 661 bp, Homo sapiens
  misc_feature [331]..[331]: Chromosome 18, SNP identification no. = rs2135383
  misc_feature [331]..[331]: allele = g, in linkage disequilibrium with rs11151137, respectively
  misc_feature [331]..[331]: n is a, t, c or g
tacaaattcaaagagtaggacttttcctttgacgtataagcctgatcaaaaatccatctctccagacaatatttagttcagtggggggactcttaaacttaaatctagctgtgtctgcaaggctgctccaggttatatttctgctgcttcaaaaagaattccgattagcattgatttccaataacctgtaaaatctgtgacacctccttacaggctcaagttgaggatgtcaatccttggttggcctttctgcacctggcatcttttagaagcatagcaaggcatatttccacagagtgggaagagagccaaatgcatgctaagcaagtcntaaagataagacttactgtttccagaggattggtgattttctatgacctgaaaataaaaatcaaaataacattcgagcatcctcactcatttgagagtaacacttgggtagttttgatggaattgggtcattgcctttaaggattatgctttctaaactggaaacgatatatattcaaagaagctgcaaatatctaggattttgggggggtgggcggagaagcattttttcagtgaaattgattctgtgataaatattttttctttcttctcaggatttcttatctaaatccatacattataaactgagctcctcaaagcttgaaaactt

SEQ ID NO: 5394 - DNA, 661 bp, Homo sapiens
  misc_feature [331]..[331]: Chromosome 18, SNP identification no. = rs17073546
  misc_feature [331]..[331]: allele = c, in linkage disequilibrium with rs11151137, respectively
  misc_feature [331]..[331]: n is a, t, c or g
catgatccaattacctcccaccaggccccacattcaacacagggaatctcatttcaacatgagatattgagggtacaaatatctaaaccatataaggtaggacgttttatgagattgtatttcaacacattctaattacttcgtggtacttttgaattcataggtgtgtatactatttttcattgagcactgacacactcattgtaatccaccaaatatagcctaaatcatttgatatgctaggccattaaacacaaccagacttggagagaacagttttacgtaagatatggctcacatgagcctttacaaaatcatctcctaatgtctncttaatcagtgacataaatcatttggactgatgttgaaatttcaaaatttattaggaagaagaaggtagtacatgaaagtcataatagttctttcccctgaaagatataagtgagagataaacttcatgattttaataagaacatacctgttgtgacatttttcccataaagcaataactagatttctctatttctaattacttttggctttgaaagatatcatggaacttcctgaactgttgcatcatacctctgtgaaatttggggaaagaattttatattcccctctaagtttgttttatttaggtaaaaaatagaggcttttaatt

SEQ ID NO: 5395 - DNA, 661 bp, Homo sapiens
  misc_feature [331]..[331]: Chromosome 18, SNP identification no. = rs17073547
  misc_feature [331]..[331]: allele = c, in linkage disequilibrium with rs11151137, respectively
  misc_feature [331]..[331]: n is a, t, c or g
tggcatcttattctaactatacagctcttccactctctccaggcttcaggttgaaatgcactgtcgaaaacagcatttttccttcccttgcctaatagttttggggattaaaagcgtgcaattccaagtgagggacagaaagagaaatgaagtgtttttgagctgagaggtttcattaactgagacactgctgatattgcaacagttcaacaccaccgtgtcacacccctcaaaaaaaatcagaaaaaaagttgaggtgctatgaaagaaatcagtctttaaaagaaggatgagcaatgtcagaaaaattcatgaaaaatgatataactantctggttgatagtacaaatcatgaataaatcatacactgcaagggaagcatgaaaattgcttggtatctaggacattggatgctgcattcttagagaaaaaaaaaaaagtgatacacatattgtcccttgcatttcccacggtagcgaaaggaactggtcatttgaaattttttacttctgtttaactctaatacaaatatattgttttccgaagactattttagcttatttcttcctgttttagaaatttatatagcataactttagtcattgtcttcctttgtatctcaaaactattgtgtaatgacttcaggatagtttcaaatgtc

SEQ ID NO: 5396 - DNA, 661 bp, Homo sapiens
  misc_feature [331]..[331]: Chromosome 18, SNP identification no. = rs11151148
  misc_feature [331]..[331]: allele = t, in linkage disequilibrium with rs11151137, respectively
  misc_feature [331]..[331]: n is a, t, c or g
aagatgtaggtttttgacacaaataaatgaaaggtgagtaagtttcaaggctttatttgaagccctaccatctttcatcttctcatattctgggatggagaactgcaattaagcctctacaacttatccttaaaaacttttatgtaagtgctcttaatttcaagataaaaggaagattcgtatatgtactagatttgcagatttcgcagatgctaccttggagtcaaggtagcatcattttgtaaagacagcgtgataacatacagtgtatacctttgggttggatggtcggttaataaatgctctaaaccaaaaaaaaaatcataaagcnatggtattctgcagaaaaactgtcctgtgtacacttaatatttcttcttaatctacaaagcaatattagaattcaattttatatgtcctttcttcctgaaggagtagtaacatggaagagaataccatattaaacatagtttctgttcttcacctcttgttatcatttaatataattcgtcctccagtatgtattcacagtcttctgtttctctccaaaacgtctttttgttttggtgatttttttgaacttgatgccaataaaagttcatacatagcaattagatgattgtgcctttaatctagggctttattgtacttgccatgccct

SEQ ID NO: 5397 - DNA, 661 bp, Homo sapiens
  misc_feature [331]..[331]: Chromosome 18, SNP identification no. = rs17073551
  misc_feature [331]..[331]: allele = c, in linkage disequilibrium with rs11151137, respectively
  misc_feature [331]..[331]: n is a, t, c or g
ttgttatcatttaatataattcgtcctccagtatgtattcacagtcttctgtttctctccaaaacgtctttttgttttggtgatttttttgaacttgatgccaataaaagttcatacatagcaattagatgattgtgcctttaatctagggctttattgtacttgccatgcccttattcctctatgacattgacttgatgagaaaatcagagcagttgactgttagaatgtttaatattctgaaattttcagatgttgcttgtggtgtagtttaatttatttctctgttacaaatatctcctctatacaataataaataaatcatcgaagntggattaaattcatgttaaacaaatttgtcaagaatacttcacagataattctgcacacttctcatcgtatacatcttgagctaaacaatgaccaggttatttccttattatcattcattaataatagcttggtaggaataaaattttcatactacaaagtggatattttaaagtatacagtttacagttttagaatattcacagagttgtggattcataactacagtctaatgacagaacatattcatcacccaaagagaataccgctacacgttagcagtcgctaaagttcccctttctcccagctgtggcaaccacaaatatgcttt

SEQ ID NO: 5398 - DNA, 661 bp, Homo sapiens
  misc_feature [331]..[331]: Chromosome 18, SNP identification no. = rs17073555
  misc_feature [331]..[331]: allele = g, in linkage disequilibrium with rs11151137, respectively
  misc_feature [331]..[331]: n is a, t, c or g
gcctgtagtcccagctgctcgtgaggctgaggcaggagaatggcgtgaacccgggaggcggagcttgtagtgagcggagatggcgccactgcactccagcctgggagacagagcgagactccgtctcaaaaaacaaaacaaaacaaaaaaaacaaaagaaacaaaaaacatctaaagctggaaaataaatcactggaaataaaaagtggaccaattatcaaacttacatgtttcgtaattctaggaaaattcaggttttctcaacaagaaaaaacaacaacaaaactttcatggtcattttttaataaggacttaaacactttcacatctnttagtattactggtatctggtcataattctatcttattattcttcatacattttttaaaagttcttgttatttcagttttcttttgtagatatgttttatgtatcactgaagtacttatagaaacatcctttcaactttttaatactattagatatttttaatgtgggtcgaaaaatatatattaactgtctcctatacaccagcatgctacatactacaaaaaccatgggattctttaaaatgctttctttaaattacatcttttaaaattcctagaatatttgcactttccttctcattaacagaagaaaactaacatctgctcacat

SEQ ID NO: 5399 - DNA, 661 bp, Homo sapiens
  misc_feature [331]..[331]: Chromosome 18, SNP identification no. = rs17073559
  misc_feature [331]..[331]: allele = g, in linkage disequilibrium with rs11151137, respectively
  misc_feature [331]..[331]: n is a, t, c or g
gccaagaaagctgtaaatatgaaaatagcatgagtgtgtctgtgtgtgtgtgtgtgtgtgtgtgtgtgtgatggcaaaactgacattgtgaaactatttaatgggaaacaataccacagaacaaagtgtctcccagcttctgaggaaatattaaatgatttcacagcaacatgaatgtaagtaaaaagagaaccactgtactaacttgaacatatgcatatttaatgccatagcttctgactcattatcatattatttagaaaactctaccttttggtcaccaaattaaaatagacagattgataacaaatttaaaggtaatgcctttaangtggctacttggtttacctttagggtctgtagattaccgattatagttaatactataaaatctcattaacatttgcttctgaaaagatgctttttacattttgagcctaatcattctattcataaaattgtaattttgtatactgaatataccttttcaaatgatatcacattagatccaaataaggctggcattaagtgttcgttggaatgctcaaagtttacatgtaggtaaaccattcttatttttctgcttgtaatgtactatgtgacactcatgcatttcatgattaagaattgcatgaattatgctattatttttatataaaac

SEQ ID NO: 5400 - DNA, 661 bp, Homo sapiens
  misc_feature [331]..[331]: Chromosome 18, SNP identification no. = rs10871574
  misc_feature [331]..[331]: allele = t, in linkage disequilibrium with rs11151137, respectively
  misc_feature [331]..[331]: n is a, t, c or g
ctgaaattgcctttctcaaaatataagtgagtggcttctattctttggcaacatattctttctcatccccacatataatgaagaaatatagaactacatgcctcataagttgcaaaattttaactagttttatagtttctatatataaaatggacttaattactgtttaaatcatcatgaatctggaacaatttcactacgccaaaaaatgtgatcgaacgaaaatatttgctgtgatatatctgtagacaccatagtcagcctaactgaacaaaatcagtaaggtttgctattggtgtagacattatacaggacatctaatcagtgtatnaaggaactgaaagtgatacattgaaaaagattaatgaatagaagaaagagatagggaaagcaagagagaaaaaatatgtttcagacaaaaaatgtgcacacttacatatttgaatattctttctcctctctgtctctctctcctatatatgtaaatagcaaatatatacatttctgtcctttattatcattttgcacatttaggctgcattgtgggaatagtgcgtgagtttgatgattaattagttatatttatgaaattcaccgttcactagataaatgttggtagatagatacacacgctgcttgaacatgtcaatatgaacacagt

SEQ ID NO: 5401 - DNA, 661 bp, Homo sapiens
  misc_feature [331]..[331]: Chromosome 18, SNP identification no. = rs17073583
  misc_feature [331]..[331]: allele = c, in linkage disequilibrium with rs11151137, respectively
  misc_feature [331]..[331]: n is a, t, c or g
taagttttacatcgtcttgtttatattactaaaaaaggaacaatgacaaaaatacttgttaaagagtggttttcttactctttcactgtcaattacatctacaaattctcctttaggattgaatttattactttactgttgtgaagtacatttgccttaatatgtctccaattttctatcttgtctattatatatgttgttatcagattaggcacctgtggctcagggtcattatcttcatgaggaggattcacctctgtaacaatgggaaattgtgggactgaatgcagaaaaagtgaggaagagtccctaagattatatgttaaatttnaatatttcttgcacagaataactttctgagtgttcataatatagtattcttatcattaccattgactacattccaaggcacaatctggtactaagatcaattaaaggaatcacaatttattttctgaagtatatatagttaaaaattatttcttcttataaaacaaggctacaaaaattgctcaatccaatacattctgtcacatattttccatacttttctcgtaccaatgagaagttaaagttatgataggttggatatctaaacttcccatagaggctgggagcaaagcctcatgcctgtaatcccagaagtttgggagaccaaggc

SEQ ID NO: 5402 - DNA, 661 bp, Homo sapiens
  misc_feature [331]..[331]: Chromosome 18, SNP identification no. = rs2174572
  misc_feature [331]..[331]: allele = c, in linkage disequilibrium with rs11151137, respectively
  misc_feature [331]..[331]: n is a, t, c or g
tgtctttaaggcacacgccaagtgtcctggcaatctctcttcattccttcctcttattccctccagcctgaaattccgcctaattccaaatgtggaccaacttaacaattttttttttttttttttttttttttactaatactcttctcatctaagggttttatttttcaccagggtcactaaactaaattttagtggatcatcaggaggtcaaaagtgacatcatagcatcataaaacaatttggttttggttatgcttctaaagtgataaataagtcagcacttcccttccccacatgtttggagtgagtactagtttggacttaatantaaaggtatagggaaagcagacagatgtcaacactaaccaaggagaaaagagcctgagaatgttatgtctcaaaaatacaaatggcagtggaaataccttcaagaaattctcagggagggcacaggtgtagacaaaacctgcaactgtttccactgttaaaattattcatttaaacgtagagagacttctcaacaaatatattttagtgtacacatctcaaagacacatacttgtaaatgttattttgtgtcacttatttcttatgaataatattgtagtttggattgtgatagagccaccagcagtattttgtagttgttaagtattta

SEQ ID NO: 5403 - DNA, 661 bp, Homo sapiens
  misc_feature [331]..[331]: Chromosome 18, SNP identification no. = rs8086469
  misc_feature [331]..[331]: allele = a, in linkage disequilibrium with rs11151137, respectively
  misc_feature [331]..[331]: n is a, t, c or g
tccactgccatttgtatttttgagacataacattctcaggctcttttctccttggttagtgttgacatctgtctgctttccctatacctttagtattaagtccaaactagtactcactccaaacatgtggggaagggaagtgctgacttatttatcactttagaagcataaccaaaaccaaattgttttatgatgctatgatgtcacttttgacctcctgatgatccactaaaatttagtttagtgaccctggtgaaaaataaaacccttagatgagaagagtattagtaaaaaaaaaaaaaaaaaaaaaaaaaattgttaagttggtccncatttggaattaggcggaatttcaggctggagggaataagaggaaggaatgaagagagattgccaggacacttggcgtgtgccttaaagacatttaagaacagaggtgttcttaacagaggtgaagttggatatgcttctgaagatagccttctccccataaatattcctccttccttcctcaagcctatacttcctctcctcacttgagccacactccacctcagctatctcagtgattttcagtaaacgctgttgcagagaattatttggagagaaaactgaaggatttcatgtgtgtctggaggttcaggacatggctaggttttat

SEQ ID NO: 5404 - DNA, 661 bp, Homo sapiens
  misc_feature [331]..[331]: Chromosome 18, SNP identification no. = rs1587989
  misc_feature [331]..[331]: allele = g, in linkage disequilibrium with rs11151137, respectively
  misc_feature [331]..[331]: n is a, t, c or g
caaggatgatgattcccaccacatcaccattcaactcttctatttggcctgcatgagagacagattaattttggaaaatgacagtgggttatcataaggttatccaggtggtgactccaattttagcagctgttctagatatggtttcattgcttgaacaaattaacacattccttggtacctggtgtgtagtatggacctggcaattttttttttcaatgtctgttagtaaagaccattgtaagcagttttgtttctgttagggcagcaatacatcttcactgtcttacctcaggggtatatcaaccctctataattacagcataatctntttcaatgggatcttgatcaattttctcttccagaagacatcacactgatccatcacattgatgacattatgctgattggacctagtaaatgagaagtagcaaccactctagacttaatgacaagatatttgcatgtcagaaagtagaaaatgaatccaccaaaaatgtagggaccttctactttggttaaatttctaagggtccagtggtatgagtaatgtcaaaatattccttctaagatggaggataagttgttatatctggaccctcctacaaccaaaaaaaataggcacaatgactattgggactctttaaattttgtaggcaac

SEQ ID NO: 5405 - DNA, 661 bp, Homo sapiens
  misc_feature [331]..[331]: Chromosome 18, SNP identification no. = rs11873636
  misc_feature [331]..[331]: allele = a, in linkage disequilibrium with rs17086215, respectively
  misc_feature [331]..[331]: n is a, t, c or g
attactgacgttctgttaacagtgccaggcaagtttagaaactaaacccaactggcctttgctaaagttttttccgcttcttataatagatgcaaggggataatacaataaataatttgaaacataaagtaacaaatttttattaatgcatttttctaactttagtaaagtgcttttaaaaattttatatcaatgatgtcacttcatactgacatagctggtgacaagaaagataagtcaaacaatggaggaatttagggaatgttttccaagggtctggccctggtgatatttatgtctggggctacttcaaattcacattacttgtggntagaacaaaaactgatgcactacataagagttttctaatatataattttccctccttaggagagttactactaagaaaataaaaaaacaaagtcaacttaaagatgggcctcacggcccagccttccttcttactctgcttttagatgttacttttatttctatcttgtctacacatcagtgcacacacagaataatttgttgtacaaccaaacactacaatggcacctgtgtgactgtaccctaaatatatttaaagaataccagagcctcatttccttttggtcaagtctcaaagcattcaatcactccagtgccaatgtggttgatg

SEQ ID NO: 5406 - DNA, 661 bp, Homo sapiens
  misc_feature [331]..[331]: Chromosome 18, SNP identification no. = rs11151779
  misc_feature [331]..[331]: allele = a, in linkage disequilibrium with rs17086215, respectively
  misc_feature [331]..[331]: n is a, t, c or g
gttttttttctccctaaggttcatatgactgcaaaaatatcttagaattatatgtggtgaatttataataacagttcccacactacttttcatacgacagctgctttattccttgtaaacaaatcctagaaagaaaactccttcgtaagaatccattcctttccttcatagcttttgaaacactgtacatttctgttttagcctctgacttcttttctcctggggggataagtgcagggagaataaaagagtcagaagttcctgtcttttcatactttccctccccgctctgttcttcctttggggctcccatgcacagtgtctcacatcnttggcttctttctgaagcccttgcctgccagctgccttcttttcctggggtgctgacactcaacaggcacctgggtgcacttaaaccttcataaattcagtctcacatttcctgatctgatcttatggatttcacatttttctaaattcctgattagtattttattagggagcagcaagttgagcctgaaagtgaatcaagcaagccttcatcctctgttgaaatgatataaaccccatcttctcatgttcatgtataagggaccattttcaaagtgggaagtgattgtgagaaagatttgctcccacgtgcctaggagcacaggtgttg

SEQ ID NO: 5407 - DNA, 661 bp, Homo sapiens
  misc_feature [331]..[331]: Chromosome 18, SNP identification no. = rs9963185
  misc_feature [331]..[331]: allele = t, in linkage disequilibrium with rs17086215, respectively
  misc_feature [331]..[331]: n is a, t, c or g
aagcaacatgacttgtatccttaaaagaagagggcattagacacacacagaggagagaccatttgaagacacaagaagaagatggccattcaccagccaagagaggtctcagaagaaaccaggcatgctgacaccttcatctcagactctagcctccagaactgcaagaaaaaactttatttcgcttaaaccacccagactgtggtactttgttatggcagccctagcagtctgaaagccatcctgcataacctctacctacagctatgagaagctgtaaaacagcaagtttcttcaacatgtcacacatcagtttcaaaggaggtttcantttgccatccccaggtgccatccctgtcactcctaatcacttcttgtaagttggatgggacgagtaagcatttacttaactccatttgagagcaaacttcagaagtgcctacttcttgattgtcttcccatgaatggaaatcgttgtcactagctggtgtacaaagcttctacttcctacttcatgccattgggcacattgggcagttctgctttgctcacagctgtcatctggggatggtattccctgggttgtcctgccacctctacgcctgtctcactgaaactcgctgccatcctgtgtgtacaggcaggaccattaatgttccct

SEQ ID NO: 5408 - DNA, 661 bp, Homo sapiens
  misc_feature [331]..[331]: Chromosome 18, SNP identification no. = rs1347012
  misc_feature [331]..[331]: allele = g, in linkage disequilibrium with rs17086215, respectively
  misc_feature [331]..[331]: n is a, t, c or g
ttctagaagattggtgtaagcaaatcccttgtcatgccgcagcacttcttgagtttcttgaagctctcaggctgggatgctgatgcccttggtaatgttgttcacaatccaagtcccctctcatatgagggcatgcatgtcctgagcatttcttcaaactacattagtagtttatagacaagcagcttgtccagggcaaactcaggccagtggttgtctgcagcgtgatgaggtttctgaggtttgtacaaagtcatcaggcttcagctcttagggcttcttcagatccagagacagcttccaggccacaaagagacccagtaagggatanggacagctcggttttagtcttcagtgacttcaaatcaagtacaaatgagaaaaactggagaaggtcatttggaggatagtgacctgatattaaagaaaatacagaaaaagggagaattttataaggattgtcagtttgggaaaggtaacatgttccggcccaatttgcagttaagtaccaaccctcctttttccacagggagggtagaaatcaattaagtgtttaccaggtcatatggtttggatttgtgtccccatccaagtctcatgtcaaattgtaatctccagtgttgaaggaggggactggtgggaggtggttggatgatggggg

SEQ ID NO: 5409 - DNA, 661 bp, Homo sapiens
  misc_feature [331]..[331]: Chromosome 18, SNP identification no. = rs17086215
  misc_feature [331]..[331]: allele = a, g
  misc_feature [331]..[331]: n is a, t, c or g
gcaacgtctccataacagaaaatatccctgaggaaagaatctgggattcattcatggcagcatgaaatgactgaagggttatctcccgttcggcaaacatttttcatttttatttttttgtcaaaaattggtacaaggcactgggtttacaaagaagaataagaaatgatctctgtcttaaagaagaagttgtaatttattactttccctgggagtattttttttaatcagtagggacaatgtcataaaaaatccaactctttacaatattggtattagtagaatttcaaataagagacaggttagtttggagttcttttggtgacatcantgaaaagtattcccttagccatacactcacctgaaaaatagtcaccaatccttgatgtgtaaaaaagaagtccactttgggaagttgaggtgggtagatcacctgaggtcaggagttcgagaccagcctggccaacatggtaaaaccccgtctctactaaaaatgcaaaaattagctgggcgtggtggcgggcgcctgtaatcccagctactcgggaggctgaggtaggagaattgcttgaacccaggagacagaggtagcagtgagccaagattgcaccactgtactccaaccttggcgacagagtgagactctgcctcaaaaaaagaa

SEQ ID NO: 5410 - DNA, 661 bp, Homo sapiens
  misc_feature [331]..[331]: Chromosome 19, SNP identification no. = rs10412792
  misc_feature [331]..[331]: allele = g, in linkage disequilibrium with rs2160740, respectively
  misc_feature [331]..[331]: n is a, t, c or g
ccacctacgcgggcggcccgtttcagccctgaactgacgaggatgccccgcctgccccgcatatttcaaccctgaactgaccaggatgccccgcctactcggcccgtttcagccctgaactgaccaggaggccccgcctgcctgaactgtttcagtcctgaactgcctggactgtttcagccctgaactgaccaggacgcaccgcctgcctggactgtttcagtcctgattgatgcctgtgcagctttgggaggcatgaccgcacctcctcctccctacacaccccagtgggggaagaggagagaaaatacgcctcttccctggctcttcnctggagtcttagtgatttggtggagatttccaaggacaggcctccgggagctcagcgccgccctcctgttactgggcagttaggtgtgggaaggaacatactgacaacccatttttcttcaggaaaatcccattcaccacccttgaccttatattgctcagcccaggggtgtacatgggggaagtggtagtcacagggacagtaaggcaagcccagtctgtgtctaatgactatttcttcttcagatagttgagaatttaaatgtgaatgcaaatgttacgcaaatgaaattactcctaagacaatttacacagaccaactattagatca

SEQ ID NO: 5411 - DNA, 661 bp, Homo sapiens
  misc_feature [331]..[331]: Chromosome 19, SNP identification no. = rs10413066
  misc_feature [331]..[331]: allele = g, in linkage disequilibrium with rs2160740, respectively
  misc_feature [331]..[331]: n is a, t, c or g
ctggactgtttcagccctgaactgaccaggacgcaccgcctgcctggactgtttcagtcctgattgatgcctgtgcagctttgggaggcatgaccgcacctcctcctccctacacaccccagtgggggaagaggagagaaaatacgcctcttccctggctcttcgctggagtcttagtgatttggtggagatttccaaggacaggcctccgggagctcagcgccgccctcctgttactgggcagttaggtgtgggaaggaacatactgacaacccatttttcttcaggaaaatcccattcaccacccttgaccttatattgctcagcccangggtgtacatgggggaagtggtagtcacagggacagtaaggcaagcccagtctgtgtctaatgactatttcttcttcagatagttgagaatttaaatgtgaatgcaaatgttacgcaaatgaaattactcctaagacaatttacacagaccaactattagatcagaacctcctgtttaacacagcctgcccaaaataactgagactattccgatcttttgggcaaggatgtcgacacactgccagtgcctctggagttaaagtggagcgctgtctttgggattgggagccagctctggatatgaacacggctatctggcaggctttggcc

SEQ ID NO: 5412 - DNA, 661 bp, Homo sapiens
  misc_feature [331]..[331]: Chromosome 19, SNP identification no. = rs2278441
  misc_feature [331]..[331]: allele = t, in linkage disequilibrium with rs2160740, respectively
  misc_feature [331]..[331]: n is a, t, c or g
tcaacatttggggatagaattgatttggaggcaagggactcttccagttaacatgaggagaataacattttatttgccagattttcttagaagaagaaagcacacttttttagaaaaacaaaacgttagaagaaacaagcatgctttgacacatgcttgttaggagaagaactgtcccacctgtctgagaactaccttctaactaattgcattggtagccaacagttacaaattgggcatttcatttaaaagcctgaattccttctttctttttgtgcagtacatcttcttagcccagattagctaatgggcagatgagagcaaggccccntgaggctgggacatggggtaggtactggggtgccgtgagggtggctgagaataaaaatgcatcagcaacttcactgttctgttaaggacatgcatgtccttcacacagaatgtttaatttctccacgagatggccgtggcttagaatagtctatcagaggcagcaatcaatttagagacacctgggccctcaccagcaattctggctcctcaggtgagcctggggatgtctttctcatgggacaagacacatttctctccggcaggccaaagcctgccagatagccgtgttcatatccagagctggctcccaatcccaaagacagcgctc

SEQ ID NO: 5413 - DNA, 661 bp, Homo sapiens
  misc_feature [331]..[331]: Chromosome 19, SNP identification no. = rs11083782
  misc_feature [331]..[331]: allele = c, in linkage disequilibrium with rs2160740, respectively
  misc_feature [331]..[331]: n is a, t, c or g
aggccagcactgaaggctactgtgcaggactgcactctgtcacaggatagacctgctacatccagaggcatcccacccctgttcatctcatcctgggcactgtttctgctcagttctcaatggcaggcttttggccctctgaagtcagagaaccaaacccactgagaatttatttcttctcattagagatttctggattccataaataattaattcagaaggaagacacacactcttctcaaatgggaggttaaaatcagggaggactccttcccaagcttctaggtccatctgttgccatcagtggagatgatttggaaactgctttcancctgattctggggacttgagccatgcagtcatccctctagaaaagactgcagggcaagttagagaccccatatagagtgtgtgatggtcaattttgtatgtcaatttgactaggataagggatgcccaaagagctggtggaaacttatttctgggtcctttctttctttcttttttctttctttctttctttctttctttctttctttctttctttctttccttccttccttccttccttccttccttccttccttccttccttccttccttctttctttctttctttctttctttctttctttctttctttctttctttctttctttct

SEQ ID NO: 5414 - DNA, 661 bp, Homo sapiens
  misc_feature [331]..[331]: Chromosome 19, SNP identification no. = rs1549947
  misc_feature [331]..[331]: allele = c, in linkage disequilibrium with rs2160740, respectively
  misc_feature [331]..[331]: n is a, t, c or g
gaagatattacagaatgcatcaaatcaaaggaacaccgagacagagacatgcaagaaacagaaacaggggccactccagggacccaggcaggcggggctaattggcagctcatcaaccctaaccattctattcatccttgcctcatgtaccttgagagtcgaagtcccaagaaagaagccaactgggctgtcttttgtcacattcctattccttgcctaatgcagtgagagtggcagggtgccctggttgacaattgcagccagcctgcatgcaacagagcagagggaaccaaagggaaccagggatccttttaccagaagaaggtatggntgccacacaaaataagcacatctgatgcaaaccatctttgacatgtgcagaagcttactgtcctctgttcttggtatgactggatgatgtaggcagagcagccagaggcatgaccgtcagctttcattcctcaagaatgggatttttcttgtgcacttctcttttcttatgcatagtcctcaatcaccttggccccagagcctgcccagccagacttagcaggactgggtcacccagttccccgtggcagaaatgtcacagtcattcaggagcatccacatttgggctgggatgacaacacaaatcctgcagtaatttaacacctgctct

SEQ ID NO: 5415 - DNA, 661 bp, Homo sapiens
  misc_feature [331]..[331]: Chromosome 19, SNP identification no. = rs2007843
  misc_feature [331]..[331]: allele = c, in linkage disequilibrium with rs2160740, respectively
  misc_feature [331]..[331]: n is a, t, c or g
cggaaattgtgagaacagggatctttccatcttactttccaccgtcacctgagtgcctaaagcagtgctcagcctgtaacgggtgcccagctatgtcacatttgtttcaggagcactcctgtggccctgccaagtctcatgttcaagttggatcccagcgttgggagtggtgcctgacgggaggtatctgggtcatggctgtggataccccacgtgtggcttggtgtgattctcactcttagttcctgtgagaagtggtcgctgaaaagagcctggcacctctcctttcttgctctcttgctctgtgatctctgcaaatgtcggctccccnttcaccttcccctctgagtggaagcttcctaaggccacaccagaaacagatgctggcaccatgcttcctgtacagcctgcagaaccatgagccaaatcaacctcttttctttataaattacccagtttcaggtattcctttataggaacatggactgagacaagcacagatcccaggaactgggcagatatctgttttccataggctgatggttgaggtcgcagctctgcccctcactgaccggcaggtttgcagcaagcctcattctccatctgttaaatggggatagtcccaaagaaagacagctgtgactgaattatttttattaaa

SEQ ID NO: 5416 - DNA, 661 bp, Homo sapiens
  misc_feature [331]..[331]: Chromosome 19, SNP identification no. = rs1263208
  misc_feature [331]..[331]: allele = g, in linkage disequilibrium with rs2160740, respectively
  misc_feature [331]..[331]: n is a, t, c or g
gagctaaagctttccagataattgtatccaggtggtgaggccacctgctgcctgttatcagctcctgtttaaatgaacccctgacaatagtcacttagggagatggatttgagacttgtctcccatcttctggctggtgtcacccacaacaaagcctttcttccctggcaatactgattgtttcagtgattggctttctgtgcagcaagtaactggatctaggctgaatcctaggtgtgcagcaacaatatgggagccaagaaagcccccttcaagccaggtgtgacttagcagctccttctctttgtggcactgtctctgcacttctctntctttctccatccttttgaagaaaagggggaataaataccaagagaatcacaaccactgcctccctgcaggagattcatccccctacctcctacctgaaggtgtttgcatggagcatgcggtggggagagctctttcctgcccatatgaccccttgttcttagaatcctggagatgattcaatgaactttctgtttccagtgataaaactcaaaataaacagaattaagtgaaaaattgggcattggcccccagtaaaaacactgtatctcctttcactcctgtctccctgaaggccatcttctctcagcttctccctttatgaagtctc

SEQ ID NO: 5417 - DNA, 661 bp, Homo sapiens
  misc_feature [331]..[331]: Chromosome 19, SNP identification no. = rs11667513
  misc_feature [331]..[331]: allele = t, in linkage disequilibrium with rs2160740, respectively
  misc_feature [331]..[331]: n is a, t, c or g
ttctctcagcttctccctttatgaagtctccatcagccctctaccctcgttccagaattgagtttcttcttgtctggtatgtttacagccccaggcgtggcttacttcccctgtcattttccactgttggctagagaagggatagcatgaccttctagtctgtgttgcagtctgccttatttcttgttttcttcaactgttccagagcatctaaagtaaacgagtcacattttatactgcaaaagacaatctgcagaagccctcattggtgcatgggaagaaaattatgtcattgggttgacataaaatattcctgtccttatgggtcttncatgtttctgcatgtcttgtgagcagagggactggctgcctttgttcagaacaatcttaaaaagaatcactgtatagtgaacagccttggaaggtaaagagaatgtctccctctagagcaaaggctaggtttgcttactgcccaacataaaagatccaggttctcaaagctcagagctcctctcctgcaacacgtccactgagtgtgcagatgtcacctggcttttccatcaccatgtgggagtcagggctcaagaaactagcacaagaaaatgttgatacttgggctattgctatttctgtgagtaataaagttctttgtctctgacct

SEQ ID NO: 5418 - DNA, 661 bp, Homo sapiens
  misc_feature [331]..[331]: Chromosome 19, SNP identification no. = rs1263209
  misc_feature [331]..[331]: allele = a, in linkage disequilibrium with rs2160740, respectively
  misc_feature [331]..[331]: n is a, t, c or g
tgaggctcccctagaagctgagcagatgccagcatcatgcttcctgtacagcctgcagaactgtgagcccattgaacttcttttctcataaattacccattctcaggtatttctttagagcagggtgagaacaaactagtacagttcctaccgtgagacctgccagtactgaggagagaaaggtgttccatatgcatttgcatctggctttgccgttaaacagcaccctttccagatctccagagaccaggtggtaggaaaaacagaaggttgagatagagggttccaaacactctctgatggatggcattgcaacttgtcccctgtgagnccctcacaaatagctggcatgcccatggcctcccccaacagttaccattcctcactgcactccaagtctctccatagccacccccacaaccattgccaggtaggctcactgggtgtatgcccgaagtttccatgtttaagatcaattccagaaggtctctccatgaaagagtggccccagcccctccaccaccaggcatggtcatctccccagggctctgtctgaaagagctttctggtaatgcagttgacttacagaacagtaggatgtgggacagtgaagtttcaatagaatgaaaggtcttgagtaaaagcaatgccctgtctggag

SEQ ID NO: 5419 - DNA, 661 bp, Homo sapiens
  misc_feature [331]..[331]: Chromosome 19, SNP identification no. = rs1263211
  misc_feature [331]..[331]: allele = t, in linkage disequilibrium with rs2160740, respectively
  misc_feature [331]..[331]: n is a, t, c or g
gatatggagaaaatttgtctggtttaactaggattaccctgaataaaccattttcctcgtcttgatttaccattgagaagctgggccctgatgaggctgtgtgaattacgattagcgtcctgccctgcctggggtttaattaattcgtggggctggatgcctggatagctcagggcactccctgatgcttggggctagcaggcagaggcgcccagcgcaagtgcagctcactgaagcttccgcactgggcttggcaacggagtgttaccttctcattagggaaatggggagtggagccctccagaggctcccaccccctggactcctggtncctagcccccagtccatagtccagcagctctcctggtgtggaggacagggacttctccattccatccctttcaatctccttcacagcaggaaggattcctaagtagcatgattaattagtcactggagcaagggagggaacagagagagacctgtagaggtcagaatttgaagagcccgtggaacccagaaccaatcactgttcatccccacctccctgacccccttggtcctcctcctccttcccagccctccgcaggctcccctcacattgactgtctccactcgacttcagggttccctgagcctcttagggaaaggacgttggaac

SEQ ID NO: 5420 - DNA, 661 bp, Homo sapiens
  misc_feature [331]..[331]: Chromosome 19, SNP identification no. = rs1368473
  misc_feature [331]..[331]: allele = a, in linkage disequilibrium with rs2160740, respectively
  misc_feature [331]..[331]: n is a, t, c or g
acctttatcgtaggataaaagtaggctttgttcattcatttcatcttccctaaaggtaccattagcgatttattgatttttctttttagagaaaatcttaaagtttctttttaagacagagatttgagcctgtgcatctaaccctccccaacttccaccttcctgctggcatacaaaacagggaaagactgtgtcagtgctgaagctccggaggaaagagagccccttggcagaaacactgtagacttctgctgggccaagagctggggaaggcagactgcaaggaggacctaccttacataggagaccacgtttgcctggaaggcgagtngaggaaaacccaggggacgccactagtgcctcagacttaaagggagagctggactgcagatgacgatggacagaggggttgcctggggtgcacaggaatcccaccaatatgcacttatgcaaagtggctccaaactgcacccagtcaagatccaacagcagttattccattcccctcattgtcaaagtcctcaggaccatcccagttgatgggagatgaaggaacagagacctcatacactctcccctaccccctttcttattcccaccagtggcacaagagggttctaggtccccctcactcctttatcctgtcccactccatccttga

SEQ ID NO: 5421 - DNA, 661 bp, Homo sapiens
  misc_feature [331]..[331]: Chromosome 19, SNP identification no. = rs2865496
  misc_feature [331]..[331]: allele = g, in linkage disequilibrium with rs2160740, respectively
  misc_feature [331]..[331]: n is a, t, c or g
gggccattctgcattctgccctaacatctttctgctatctgggaaaagggcccatgcccagtgcttcagggcaatttccagctacctccaagcccagagaggtgctctcagcatggggcctccactcaccctgtggcatgactccacccacccacccactggagcattcctgccccccatattctaccccctggctgtgaaccttcataagaggagggagtgggggcacctactttgtgccctgccacaagattgggctggatgaaggccatgccatgaagaaaacatcagacaagccaaggagggtgcaggctcttgcatggatcacagngttcccagggcagtggagtgaggccggtgggcagtgtggacagtatgtgccccagagtccaggaaggcagccatcccattggcctggggcagggggaggaggatcaaacccctttgccaagaaggggatgatcataggcccttcccctgccccctgccctcactgctggctccctgtcagtcctcgagagggcacggcacagatgtgggtgctgcttctttcccgtgggtggtcttcattttttttttttttttggagaccgagtcttgctctgtcgcccaggctggagtgcagtggtgtgatctcggctcactgcaagctccgcctcct

SEQ ID NO: 5422 - DNA, 661 bp, Homo sapiens
  misc_feature [331]..[331]: Chromosome 19, SNP identification no. = rs888303
  misc_feature [331]..[331]: allele = t, in linkage disequilibrium with rs2160740, respectively
  misc_feature [331]..[331]: n is a, t, c or g
attactactactcttttttatttttagcccagatggtgtgtctctatagggactggaccacacgagtcaggaagactcatatcagagtttgattgcgtatttctccatctacccacccccgactcatccatcatcctctctccctctctcctccctccagttcatgggaagttagcatgagcattctgccagcagactatggagaacagtgcaggggggtgaaaatgaagagacagttaagagagcaacacacggggctaagaggccaagctgatctgctgggccttacacctgggtgtatcagtggaagtgtgatgtggacagagcaccngagcttctctccagcttaggagcagtccgcgttgggggaaagggagggggttgtttttgttggctttggctgtctcccagcccattagggatcagggtctatgctgtgtgctgtgtgatgctctgagggctgccttagctccgggtgaaagaggatatctgttagttttggaagtaccagtgtcaggcagctgagtgttttcggctttcaaagatgatgccctctgtgctcctggagccattctgctaatggaatgtggggcctgttctgagggattaagccaaccctgtggtcagagccaggggtcactgggtgttctgtctcctggaa

SEQ ID NO: 5423 - DNA, 661 bp, Homo sapiens
  misc_feature [331]..[331]: Chromosome 19, SNP identification no. = rs11667078
  misc_feature [331]..[331]: allele = a, in linkage disequilibrium with rs2160740, respectively
  misc_feature [331]..[331]: n is a, t, c or g
ttccttctgaccaccggagggcagaaaacttgcagggctgagctgtccatggtgtcacaggctctgtccactgagaccaggtgtgagaacaagaaatggacactatctaaaagggagggagtgggaatgttctgtgtgtacacacaggagccctggaggagctcggtccatgcctggctggggtaacccgggtaggcagtctggaggagagggcttgagctcgtgttgaccaatggataagagttctacaggcaagcacaaggaagggaggacaattgaaagagggacagcaggaccagaggcatggaggtgcactgtgcatggtgttatngtgaagaagaggtggaaaggagagcatccaggtggcccccatgcaccaggggctgggacagtttcaaggcaattgctgaaatctcacgatagtcctgagagtgggtgttttgcatgtgacgaccatgaagctcagaaaggtaaacctatgggctgatgtcccccagccggactcttgagccctgggtgtctgattccaaggccacactcctcctattgcacaggtgtgctttcaaccagacactgccttcccaactccccctggagggaaggcttgagcgctctggtttacacagggcccgctggatttctgtcaatagggaacgtgccg

SEQ ID NO: 5424 - DNA, 661 bp, Homo sapiens
  misc_feature [331]..[331]: Chromosome 19, SNP identification no. = rs8103663
  misc_feature [331]..[331]: allele = a, in linkage disequilibrium with rs2160740, respectively
  misc_feature [331]..[331]: n is a, t, c or g
ttgtagctcagagctattcctgcttccctgtgggaccctgaatgccggtagttcaaaagcactttccaacgaatgcagattaaaaagacttaaacctctgtttcccttttctccatatacataaaatgataaacacccctgggacggctaggatttatataggcagattttttgaaagtttgtcttatatatctggactatggcttataaatcaaatttggttctctttgctggagagtaaattatttatccaaggcagagcaccaggcgatagaaggagaggcacagagaagacactgttttccagaagtcatttatattccccaagatnaggaagtgtcgggggtggaagtttctgagttacagattctggcgttccttcttgattcgtgtgctctctgctggtagccatggactcctgaaattggctttctgttgaagacatcatttgtggaattcaaatcagtgttttgcatttgggtccagcaccctgggtggatggctgcctgaattgagcagtgaacatattcagctggggaataaggggaccatcctgcgagtccatcaggctgcactgagttcagctccaccatcactctccctgggatatcaagcacacttagaacctcgctgggcttcagtctccttatagctggagcca

SEQ ID NO: 5425 - DNA, 661 bp, Homo sapiens
  misc_feature [331]..[331]: Chromosome 19, SNP identification no. = rs17110
  misc_feature [331]..[331]: allele = g, in linkage disequilibrium with rs2160740, respectively
  misc_feature [331]..[331]: n is a, t, c or g
tgatttatatggaatggataaaggccagttctccctcgggtttccttttgagggtcttctatctattgggcaatttaggttagtgattttttacataatcatcaaggaaatgagagccatattaggatggaatgcattatttagtttcttcatttatttataagtcagtgtggataaccctctcttttgaagcatctgaagtgcaggctgcaagttggcaaacgagatcctagcttcaaatggcacagtggcatttacaaaccctgtggcttccaatccacgtttgatttggatggaatgaaaactgtggaagctttggaaaagccatctnctcaattcccagtggcttatgtttctcatttggtctgaaatgtggactcaggacagggagtgaaggatatggtggacagttcttctcccaaacctgcttatcccaggtgccctggagccacccttctccacaccctgaccctcagtttccttgacagtctatgaaccaggactctgtggcttatggggcagttagccagcatttcctactgccttctcctccttgccatgtcactttagtcctgtctttctcactgagcactgtcaggcaagcacaattaactgtcagtgttctgttttttcttctccctgccaaattcattttccaaaa

SEQ ID NO: 5426 - DNA, 661 bp, Homo sapiens
  misc_feature [331]..[331]: Chromosome 19, SNP identification no. = rs4805335
  misc_feature [331]..[331]: allele = a, in linkage disequilibrium with rs2160740, respectively
  misc_feature [331]..[331]: n is a, t, c or g
tgaggtcaagagttcaagaccagcttggccaacatggtgaaaacacatctctactaaaaaaaaaaatacaaaaattagctgtgggtggtggcacaggactgtaatcccagctacttgggaggctgaggtgggagaattgcttgaatccaggaggcagaggttgccatgagccagggtcatgccactgcactctagcctgtgtgacagagcaagactctgtctcaaaaaaaaaaaaaaaaaaaaaaagcacaagacaatatggatattttcctgtaagtgaaatttataaacatgaagcccacaattatagagcaaagatagttgctttgcntttcctaggatcaaatggaagcccctattcagaactaaatgggctggctgtggtggctcacacctgtaatttcatcactttgggaggctgagaagggagcattgcttgagttcaggagttcaagaccagcctgggcagcacagcaaaaccctgtctctacaaaaaaatacaataattagctaggagtggtgatgtatgcctgtagtcacaactactcgggaggctgaggcaggaggatcaattaagccccagaggtcaaggctgcagtgagctgtaatcacattattgcactccagcctgtgcaacagagtgagaccttgtctcaaaaaa

SEQ ID NO: 5427 - DNA, 661 bp, Homo sapiens
  misc_feature [331]..[331]: Chromosome 19, SNP identification no. = rs12974901
  misc_feature [331]..[331]: allele = a, in linkage disequilibrium with rs2160740, respectively
  misc_feature [331]..[331]: n is a, t, c or g
agttgctgttcattggtgcagggaagaaaatagaagaaacttgtgagaaggtggtagaaggtaggagtttcatgttggacatgttgggtttgagatgttggttagacatctgagtgagtctggagagtaggtagctggtatacaattctacagttcaggaggcaagtctgagatagaaatgaccatttggaaatgaccatttttgtcgtgtgtataaggtatttaaagccatgagattaaaggcaatcactgagagagagaccgttaataagagaggatacgtataaagacagcctggggacgttccaattttagcaatcaaggaaaggangagaaaatggcaaagggatctggaaagcagacccagtaacgtagaagaaaagctacaagagtctggcttcctggaagccaaatgaacaaaatgtttatggaggaaaaacttttcaaatactgcaaatatttaggaaatatttcagattgcaaataggccaagtgagatgaaggctgataattgacaatttcctggccaatgtgtaggtcattagcagtttcagtgtagctataagaacataagaactggagataaaaaatagcagcaattcttttgtagagttttgctgatatatcagctatttggaaaggtgacctgctggttcaccag

SEQ ID NO: 5428 - DNA, 661 bp, Homo sapiens
  misc_feature [331]..[331]: Chromosome 19, SNP identification no. = rs11672470
  misc_feature [331]..[331]: allele = a, in linkage disequilibrium with rs2160740, respectively
  misc_feature [331]..[331]: n is a, t, c or g
gccagaagttctctatttcattcttttttttttttcttgaaacagaatctcactctatcacccaggctggagagcagaggagcagctcactgcaacctccgccacccaagtagctgggattacaggtgccagctaccatgcccagtagagacagggtttcaccacattggccaggctggtctgtaactcctgacctcaagtgattcgccctcctcggcctcccaaagtgcttggattaaaggtgtgggccaccataccctgtctctctatgccattctatatatcaacacaaacatttaaaaatgttttattctttcttctttcttttcantaatattttcagatttccggttccaggcatggtagaacctttctacagatagcaattacaaattctaggggaaaaaatatactagacctggccacttaagggaacttggaagcaaccagaagcaagcagaacctgaagagatttttcattgcaaataagagagtgcacagagagtacgacccatattcatacaactttgtcccttaggtgcaagctgaaaactgtagttatattgacttgagatgtcaaagaagggagtttgaaactgctggtgtggatgaaaaatgaaggggaaatcctttaaaggaagaagtcacagaggagggggag

SEQ ID NO: 5429 - DNA, 661 bp, Homo sapiens
  misc_feature [331]..[331]: Chromosome 19, SNP identification no. = rs4805336
  misc_feature [331]..[331]: allele = g, in linkage disequilibrium with rs2160740, respectively
  misc_feature [331]..[331]: n is a, t, c or g
gaagaggaaaacgatcaaatgcccagagacgagagagaacatgggtatggctggagtatagggaccagggaagggaggggaaggactggtaggaaatgaggcaggagaggcaggcagatgagaaagagcctcttccattgtattaagcaagttgggttttcctgagagtgatggggtaccaacaaaaagattcaagaaaaactatatcaacaaaattttagtgctgaaatatcctggcttctgtaatgagccgatctggagaaattaagtatgaggtatccaccgaatgtccagattctgtaagaaatttagttcattggttcagaactcngcataatggtttaggctgctatggattcttcagcctactaggtatgactaaaaccctggaagtaaatgagatactcagggagcaactggggaaataaaaaggcccaaggcagaaaactgatagtcaccagcatgcagcctaattggttaatgcattaacagatagcactggcataacatattttatagtacagatagggcctccttgaaatcagtctaaattaatgaggtgtccaacactcaggtcacttaattgatttctgtttctctctctgttttagaggatcttgtagaaaagtggttctctatcagtggacatgtggtatgtctg

SEQ ID NO: 5430 - DNA, 661 bp, Homo sapiens
  misc_feature [331]..[331]: Chromosome 19, SNP identification no. = rs11673068
  misc_feature [331]..[331]: allele = a, in linkage disequilibrium with rs2160740, respectively
  misc_feature [331]..[331]: n is a, t, c or g
agggaaatgcaaattaaaaccacaatgagataccaccttaatcctgcaagaatggccataactaaaacataaaaaaaaaatagatgttggtgtagattttgttaaaagggaacacttctatgcagctggtgggaatgtaaactagtacaatcactatggaaaacagtatggagattccttaaagaactaaaagtagacctgctattcgatccagcaaattcactactgagtatctacccaaaggaaaagaagtcattatatgaaaaagacacacacacacatgcaagtttatagtggcacaatttgcaattgcaaaaatatggaaccaacntcaatgcctatcaatcaacgagtagataaagaaaatgtagcatatatacaccatggaatactactcagccataaaatggaacaaaataatggcctttgcagcaacttggttggagcttgaggccattattctaagtgaagtaactcagaaatgaaaaaccaagtgggagctaagctatgaggatgcaaaggcataagaataatataatggactttggggactcagagggaagggtaggggggagttgagggataaaagactatacatagggtacaatgtacactgctcggatgacaggtacatgagaatctcagaaatgaccactaaaaa

SEQ ID NO: 5431 - DNA, 661 bp, Homo sapiens
  misc_feature [331]..[331]: Chromosome 19, SNP identification no. = rs4805337
  misc_feature [331]..[331]: allele = a, in linkage disequilibrium with rs2160740, respectively
  misc_feature [331]..[331]: n is a, t, c or g
catgcaaccaaaagccttctgtatgtatcccaaaaactattgaaatgaaaaaataaaaaaaaaattaaattatgtaagtcttaaatttttaaatatttattcaaaactctttttaactctttgaggactgacagggcaccctgggtgacctctggtctatgagccaagacttcaatgccccagcccaactcagccaggactgcactctagcatcttttggagaggaaccctttcattgtgaaattcctctttcctctcaccaaccccctgggtcagggtaaactcagtaagtgtggactgtctcatactgagttgtctccaaggggtcccntgaggttgcagggcacccgttgctgtggagtcctaaagagggctttcagaggcacaaagaagacagacacagcaacaataacaaatgaatgaaggaatcagtttttcccaagaaaagagccactgtatcccaataggcctgtaccaattccagggaaagaacaacatagcgacaacataaagcaatctgtgtgattaggatgctgcactcatcccagccaggtacatgtccttgaactggaggtgctgcgcacggcacctgtttacaaattaggcaaccggaggtgctgaaaagtattcatctcttctgctgcttccttcagtatgtata

SEQ ID NO: 5432 - DNA, 661 bp, Homo sapiens
  misc_feature [331]..[331]: Chromosome 19, SNP identification no. = rs759634
  misc_feature [331]..[331]: allele = a, in linkage disequilibrium with rs2160740, respectively
  misc_feature [331]..[331]: n is a, t, c or g
tgctctcttccttatggttttactttcagttacttgtgatttcaagacacaatttcaagtgtgatagataagcaggagtttattttctaatagatctgttcacattctctaactcacactctttagaccaacatcttcatcttggtataatgaaacaattcctgtggtcaagagatgtaattacactgattaagtttgactcatattgcaactccttagccaatctcctctgactactagggtttggtgttctgattggtcaaaccagagtcacatgctcaacctctgagagtatccccacctgaaccaccacgtaagagtgtggggaganaaactgtttcacaggggaaattctaggtatttatcagaagaagcagaaacagaatctgggcagacagaaaaaatgacatctactataaccaaagctaatggtatattttaatattatgtactggaaacaccttcacagaaatttagggtagggtccatacataattcataaaattgtagattctgagggttagaaggtacatcagaggttataaaatcaattcccaattgtgataagttgcagccaaattttaacttggtaaatgaagtggaatagagtatgtggcacccttggtagattcttaaacatttgagggtccaaaaaatatta

SEQ ID NO: 5433 - DNA, 661 bp, Homo sapiens
  misc_feature [331]..[331]: Chromosome 19, SNP identification no. = rs2160740
  misc_feature [331]..[331]: allele = a, g
  misc_feature [331]..[331]: n is a, t, c or g
atgtaggaaagcactgtcacaagaaccaaaaatcaggtaccagcttggccttagtggggtagagcaacaagcaggctcttagggtccctgagtcccggcctagggtcttggacagcatctctggacctgccctgggccacaggggagctcacggtcctgatgtgtgggtcttaggcttggcagcattcaccaccagctgacagaagagccctagggtggcctagcagaacccccttgtggactggtggaagtggaggctacaggaagaggttcctctgcctgtggaaaaggaagggaaggacggaaaggactttatattgtggtttgtacnccaatttagcttcagtcgaatagaatatcaggtaaattgataaggtttttgtctccaatgtctggctcctagacatcatcactggagatgtctgggtcctgaaggaatttgctgccctgaaggaaagggccttgggtgaggccagtgctgtgctggcttccagtctcactcagcactggccaagtggtggtggccataggggtgcttgcatcaccatatcctgagttccaggtggctcagcagagatagaatccttttgtttgtgagaaagtaaggcaaaagaacaagaatctgcctgataatccagagaattctttttgatcttatcca

SEQ ID NO: 5434 - DNA, 661 bp, Homo sapiens
  misc_feature [331]..[331]: Chromosome 19, SNP identification no. = rs8106473
  misc_feature [331]..[331]: allele = a, in linkage disequilibrium with rs2160740, respectively
  misc_feature [331]..[331]: n is a, t, c or g
gtcttcatagtatgtaggggagatacagccacaaatgaatctaatatgagaaaattctaaagtaaacactcataaaaataaaaatgatagcaatagctaacaggaagtaaatccctatcatgaccagcactgcgctaagcactttatatgcacgaaatcatttgacatccacaaccccctgaaaggagaaactgccaaccccatttgcaccagggaggaaattgatgctcttgaagtttcaccagatagaaaatagtggagctggaattcgaacctaagtgcttgattctgaggcccagtttctgatcacgacagtgcaggagcaggtagngtttggtgggatctgaggatggagattgcttcttcccaggaggatcatgtaagcctgcatagagaaggggcacgttaaacctaaattctatcttctaaccttgaagatagaatatggacttgtacagactagcgctccatgaataagaaataagagctcaggagtgccagggcctcaaaggaggagcaggtagagtttggtgggatctgaagacagagattgcgttttcccaggaggatcatgtaagcctctgtggagaaggggcatgtgaacaggccttgaaggtagaatatggacttgtacagactaacatcccataaatgagaaata

SEQ ID NO: 5435 - DNA, 661 bp, Homo sapiens
  misc_feature [331]..[331]: Chromosome 19, SNP identification no. = rs12971698
  misc_feature [331]..[331]: allele = c, in linkage disequilibrium with rs2160740, respectively
  misc_feature [331]..[331]: n is a, t, c or g
gctccatgaataagaaataagagctcaggagtgccagggcctcaaaggaggagcaggtagagtttggtgggatctgaagacagagattgcgttttcccaggaggatcatgtaagcctctgtggagaaggggcatgtgaacaggccttgaaggtagaatatggacttgtacagactaacatcccataaatgagaaataagagctcacgagtgccagggcacaaggagcagtactgtgttagtatgtgctgctgggtgctagggatatactgcacccagtgttgatggcacagggtctcaggactggatcagacatgatcccagcccagtagnttacatggggtcaggtaggtcctaactaaatccacaaaggagagagtggcaaattaatcttttgccttgactgtagccacttgtaaataaaaatacgaaggtaccctgtagtcccagttactcaggaggaggctgaagtgggaggatcacttgagcccaggaggtcgaggctgcagtgagctgtgatcatgccactgcactccagcctgggcaacagagcgagaccctgtctttaaaaggaattgttttttaaactatgaagacgtttttcttccctgctgtgaaaacaagatttgtggaatttgaataaacttgtcaaatataaaccta

SEQ ID NO: 5436 - DNA, 661 bp, Homo sapiens
  LIR9
  misc_feature [331]..[331]: Chromosome 19, SNP identification no. = rs1761450
  misc_feature [331]..[331]: allele = g, a
  misc_feature [331]..[331]: n is a, t, c or g
gatccatggaggaccattaaaatgtgacacctttcctttctattaatgttgacttcccttggttggattcccttctcttcccagcccgagacatgaggctacatcccacatggcaggcagcgttgggtccacatctctgcacacctgcatgctctggtccttggcgtgtcacacagtccacttcaattctcattatcacactccctgtgtgctttactgagcctccatctcttcagttcagagttccacacctgaaccagtaactaaatccatgggagaagatcagatgccctccaggaaaagataaatccaaaatggcgtcctaacctcntgtctgtagccttcaagccccattcgctctttttttttttttgagacggagtctcgctttgtcacccaggctggagtgtagtggcactatgtcggctcactgcaacctccacctcccgagttcaagcaattcttcttcctcagcctcccaagtagctgggactacaggcgcatgccaccatgccaagctaatttttgtatttttagtagtgacagggtttcaccatgttggccaggatagtctcgatctcctgacctcgtgatctgcccgccacagcctcccaaagtgctgggattaaaggtgtgagccaccgcacctggcctgtagtga

SEQ ID NO: 5437 - DNA, 661 bp, Homo sapiens
  TMC2
  misc_feature [331]..[331]: Chromosome 20, SNP identification no. = rs2223883
  misc_feature [331]..[331]: allele = a, in linkage disequilibrium with rs6050260, respectively
  misc_feature [331]..[331]: n is a, t, c or g
gtttgcagcagcctctgggtgttttagcttctgattaactcctggggagcaaagaagaagttttaggatgcccttgaaggttgaaaagcctagaacacagagatattttttttttttttgccatacttcatgcacacccaattgatgatatctgcctttgagtctctgcgtagggtgttcccacagtttggggtgttggacattcagtcattgcttatttagattccacctgttattcaaagcctcactgggatgttcaccttctccatggaggaaccctgatggcccagcacccggggaattcagcgctccatcaagtcctgtcttgcangcatattgctttctgccttgtcttaggattaccaatgcctatgtgttatctcctctgccacactgtcagtatctaggcaacgggaactgaatgttttcatctctctaatgccttggcatggccctcagctgaaaatgacataaatgagtctgtggcccattgggatggtacaggctccctctaaagttcagggcacccagggcccatcaacggtgcattcacgttatttttaaatggccaagggcacgatgcaccctttacctctttagttcatgtctgggagcaaccagacagtagacaaaggctgtaaccaagccaggatggttggca

SEQ ID NO: 5438 - DNA, 661 bp, Homo sapiens
  TMC2
  misc_feature [331]..[331]: Chromosome 20, SNP identification no. = rs6083663
  misc_feature [331]..[331]: allele = t, in linkage disequilibrium with rs6050260, respectively
  misc_feature [331]..[331]: n is a, t, c or g
ggttcctccatggagaaggtgaacatcccagtgaggctttgaataacaggtggaatctaaataagcaatgactgaatgtccaacaccccaaactgtgggaacaccctacgcagagactcaaaggcagatatcatcaattgggtgtgcatgaagtatggcaaaaaaaaaaaaaatatctctgtgttctaggcttttcaaccttcaagggcatcctaaaacttcttctttgctccccaggagttaatcagaagctaaaacacccagaggctgctgcaaacctgtctctaaaacctgcagtaacccaagcccacaccctaatactaccatttangaaacacactcaggctgcccagccataacccttccttagtcctttcctttacctacccgattgggcgctgtctcactcagctgagagtcactatttttcatcactaaaggagtcagaggccgggcgtggtggctcacgcctgtaatcccagcactttgggaggccgaggtgggtggatcgcgaggtcaggagatcgagatcatcctggctaacatggtgaaaccccatttctactaaaaatacaaaaaattagccaggcgtggtggcgggtgcctgtagtgccagctactccggaggctaaggtgggagaatggcgtgaacccaggaggt

SEQ ID NO: 5439 - DNA, 661 bp, Homo sapiens
  TMC2
  misc_feature [331]..[331]: Chromosome 20, SNP identification no. = rs4815323
  misc_feature [331]..[331]: allele = g, in linkage disequilibrium with rs6050260, respectively
  misc_feature [331]..[331]: n is a, t, c or g
tccatgggcccctcctcattccacagcacctgaggacaccacctcctttccaacttccctctgcctccgccctggctctgcctccaggtcatcctccttggcctccagtgcctctggtggggagtccctgtccgaggaggaactggcccagatcctggagcaggtggaagaaaaaaagaagctcattgccaccatgcggagcaagccctggcccatggcgaagaagctgacagagctcaggtgagcaggctgcgggtcagccagggccttccgatgtccacagctccttctgatgggaatgggagccctccctccacatttccccaaaggngcttgatgtgagggggctgctccagcgaggacagcactcagggagccccatgagagccaaggcggccgtgctgttcgccagcaccacagggcctagagggggagccatggaagactcggaggactcccgacctgtgcccatgccttcccttgcctggctgccccttttatcccatgccacacttcatctcgtggcttctgtgcctccctcacagcccaacagagacatgccttctcctggaagctttctagaccccttctcctcaagagcagctctctctcatgttcctggagcacccagtgtctctccatgtgtacacactctcgcttg

SEQ ID NO: 5440 - DNA, 661 bp, Homo sapiens
  TMC2
  misc_feature [331]..[331]: Chromosome 20, SNP identification no. = rs11087484
  misc_feature [331]..[331]: allele = c, in linkage disequilibrium with rs6050260, respectively
  misc_feature [331]..[331]: n is a, t, c or g
cgtgctgttcgccagcaccacagggcctagagggggagccatggaagactcggaggactcccgacctgtgcccatgccttcccttgcctggctgccccttttatcccatgccacacttcatctcgtggcttctgtgcctccctcacagcccaacagagacatgccttctcctggaagctttctagaccccttctcctcaagagcagctctctctcatgttcctggagcacccagtgtctctccatgtgtacacactctcgcttgcgtgatttgcacggtgagtgggagagggtctgcctgagccactgtcacatccccattgcctggcacnaggccaagctggcccccatgcaacatgaatatcactctgtgaatggcaacaggcctcctgcccatgccactcgactcctgttttctactcagccacttctttggtttccatgcaaaaggctgatgcacggagcatttgatgattctggggtctttgctgcagttttaaaataacagtagactcacacctgtaatcccagcactttgggaggccaaggcaggtggatcacttgaggtcaggagtttgagaccagcctggacaacatggtgaaaccccgtctctactaaaaagacaaaaattagccgggggtggttgcgggcacctgtagtc

SEQ ID NO: 5441 - DNA, 661 bp, Homo sapiens
  TMC2
  misc_feature [331]..[331]: Chromosome 20, SNP identification no. = rs6083683
  misc_feature [331]..[331]: allele = a, in linkage disequilibrium with rs6050260, respectively
  misc_feature [331]..[331]: n is a, t, c or g
caggttcaagcgattctcctgcctcagcctgccgagtagctgggactacaggcgcccaccaccgtgcccagctaattttctgtatttttagtacagacggggtttcaccgtgttagccaggatggtctcaatctcctgacctcatgatccgcccgcctcggcctcccaaagtgctgagattacaggcatgagccaccgcgcccggccctcagcctcctctttttgaatcctttctccctgctccctccaagctgggctccttctcctgccagcagggcagaacagccatctgtcactctaatagaacctcactcccactcaggtgtcaccngaacacatcttttattaacagtggaaaaagtgcagccttgatgcctatggaaatgagatctccagctggctggaagtctcagggaccgtgacaatccctgagggctcctcagctgccagaggagaaatctgacatctccttcctgcctctgaggggcagagttcctggggctggcaggataggaagaagctaaggcctgagaagccaaggagacctatgcctctctcactggagtgggcctccccagcaaacagtgggtctcctttccctggacctccctcctgtctcttcctagcttcttcccttccccaaggctccttatcctggact

SEQ ID NO: 5442 - DNA, 661 bp, Homo sapiens
  TMC2
  misc_feature [331]..[331]: Chromosome 20, SNP identification no. = rs742839
  misc_feature [331]..[331]: allele = a, in linkage disequilibrium with rs6050260, respectively
  misc_feature [331]..[331]: n is a, t, c or g
caccaccacgcccggctaacttttgtatttttagtagagatgaggttccaccatgttgaccaggctggtcttgaactcttgacctcaagtgatctgcccgcctcagcctcccaaagtgctgggattataggtgtgagccaccacacccagcactagcaagcctttttagatagtctacagtaaccatgctcaggtcagccagtgcctgactgggccagagaatggggcccccacactactatttctaaaagagaggatgtagtatggggatgccgtctgcaactggagactttattttcagaagaagaaatcatactggtagcaaaggggntgcgttctcgaatgtctggtaattctggagagacgattacaaattaagagagcaggctctgtaatcccagcactttgggaggccaaggtgggaatatcacttgagcccaggagttcgagaccagtcccggcaacatagcgagaccttgtctctaaaacaacaactacaacaaacaaaaaaacagtgcaggctctggagccagaattcctgagtccaaatcctggctgcgccacttaacttgctgtgtggcctcagtcttctcatcagtaaaatggtgacaataatggcagtaccgacatcacagggtgattgtgaggattcagtgaattg

SEQ ID NO: 5443 - DNA, 661 bp, Homo sapiens
  TMC2
  misc_feature [331]..[331]: Chromosome 20, SNP identification no. = rs4815349
  misc_feature [331]..[331]: allele = c, in linkage disequilibrium with rs6050260, respectively
  misc_feature [331]..[331]: n is a, t, c or g
gcttttccctattcttcccactaagtacaatgaaaaccctgaatgccatatttaaagcaaatataagaagatttgaaaaggtagaaagaagaaggcaaactggctaagaacctcaggaccaaagggatgaccagggcattgagttccttggattttcttttttaccttctatatcccagactggctattggaaaagctggcaaccccaaaactccaatggaggcagccaaaaaaaatgccccaagaaaaatctgctatttctggccaaaggaccagggaagaaacagactggcaagacagaaaacttttggacaataactgttctccagcnaaataccacagacaaaacaacagcccccattgccaaccctggcagcaaaggcaagtggggaagcctggatacccacctttgccaggccaaagcaaggtgccccaatacccctaaccagggtgtgccagaggaggctgagtgggaagcaggaattttcatccccagcaggtagtaatgatccctccttttccccatggtttcggtgaggaccatgtggggagtctagactctcaccatgacttggaagtaaccaggcttgagtggaggcctgaaccccatccctgctcagcggtaacaaggagcttctcctcagcctcaggtgtcaaagga

SEQ ID NO: 5444 - DNA, 661 bp, Homo sapiens
  TMC2
  misc_feature [331]..[331]: Chromosome 20, SNP identification no. = rs4815352
  misc_feature [331]..[331]: allele = g, in linkage disequilibrium with rs6050260, respectively
  misc_feature [331]..[331]: n is a, t, c or g
ttggaattccagaaaaagaggagaaaaaggatgagactgaaaaagtattcaaagaaattatggctaaaactgtctcagatttggcaaaacttacaaattcaagaagcaaaacaaatcccaagcaggataaacccaaagcaaagaaattcattccaagacacatcatagtcaaacttctaaaaacttgtaggcagtcagacagaaacaaaacatcacctacagggaaaaaaacacaattataatgacaagaaacttctcatcagaaaccatgaagggcatgccctttgtgcctttgttattatttatatatcttcacagagttcaaaaaaantttgctgtgcccatggaaattcataaaccaggtggactcttcacagtgactggtcttcatagtttgcaactagcctttggtagggtcccctgttctcttgggggtttgctggatgtctggacacagagtctgaacagagagaagagaagcgtttgctgctgggctcaatgactcaggcgcaagagctgcccctacttttgagaattgttaactgaagctgctaaatcttaaaacctggcacatttaagctcatagaactccaagtgcttttgagtatttgcccacttgtaaaatacaggaagaagacaaaaatatgaatattgtgaaacc

SEQ ID NO: 5445 - DNA, 661 bp, Homo sapiens
  TMC2
  misc_feature [331]..[331]: Chromosome 20, SNP identification no. = rs767739
  misc_feature [331]..[331]: allele = t, in linkage disequilibrium with rs6050260, respectively
  misc_feature [331]..[331]: n is a, t, c or g
tcaaggagcatctgtattaattttatattgctattgcaacaaattaccacaggttaagaatttaaaataccactcgttaattagtgcacagttctgtaggtcagaagtccagcatggcatggctggattctctgttcagggtctcatcacaccaaaattatggtatcagtagggctgcagttctcacccagggctaaggttctcttctgagctcactgattgttggctgaattcacttccttcttatgctttttgtgtagcccctccagaggggccccagacacagagagtcaagaatattcctgctccacgtttgataaaatctaatatnccttcatgataaaagcctccaacaaactaggcattgaaggaacatacctcaaaataataaaagttatctatgagaaactcatagtgaaattcatactgaatgggcaaaaactggaagaatttcccttaagaactggaacaagacaagaatgcccattctcacttctcctattcaacatagtactggaagtcttaatcagagcaatcaggcaagaggagaaaaatgaaaggcaggaaagaaggaaataaaagtaggaaaagaagtcaaagtatctctctttgctgattatatgattctctacctagaaaaccctaaagactctgccaaaag

SEQ ID NO: 5446 - DNA, 661 bp, Homo sapiens
  TMC2
  misc_feature [331]..[331]: Chromosome 20, SNP identification no. = rs1883980
  misc_feature [331]..[331]: allele = t, in linkage disequilibrium with rs6050260, respectively
  misc_feature [331]..[331]: n is a, t, c or g
accacagcccttctgggtctccaccaactcaacctgtcctgatttggggtttggaaaataaaatcccagtggttttaacatcattagttctctaagtgtattcactggagagaagacaagtctcaaatgtattgaagccctcacagtaagtatggagaaattggcaggatacgattggtttccatgcctagatggatcagaatggtcaggtggccctcacacccaggattctgggggcagctggacacaaatggcgaagctgggcagttgccgaagttggtcgccagattccaaagctgagcaagccctcccaacagattcactgcccccnccccacacaccttggccatcagcatcttgtaggcatatagttgcttgcctttcccctttcccaaggcaccttcatacttctccacaaattcctgggcctccctgcttagaaaaaaaaaaaaaagcaggatttcagttagcacctaaccagaggaaatctgaattatgaagcctcaaacacatgtgtgaaggcttatgtctttgtatacccctggttaaaatataaattccatgaaggcacgacattctgtctgttttatccactgaagtttcccaaatgctgagaagagtgcgaggtacataacaggcatggtaggcagaactgtggccc

SEQ ID NO: 5447 - DNA, 661 bp, Homo sapiens
  TMC2
  misc_feature [331]..[331]: Chromosome 20, SNP identification no. = rs6050256
  misc_feature [331]..[331]: allele = c, in linkage disequilibrium with rs6050260, respectively
  misc_feature [331]..[331]: n is a, t, c or g
tgtgacatctcattccaattctaaaatgtgaactagccatcctagaacagcatcaattgataatggtgatcatagctctccttatctttgcatcactttaatgagaatgactctaatgactttcacactaagctgatgggagttgatggcttgaaatagattttctttgtcaccgtaaaaattattgtctagttgttgtttagtaagacttccatttcattggaaatagataattaggttttattaaacaccttttcctttatgttattaatttttttttatttctgggataacctcagtcacggtacattacttttaattccacagacangtttgattttccgatattttatttatgatttttacatacattttcataagattgatatgaatttgtgtgtgtttgtacacaagtgtatgcatgtgcagtatcttggcagattttaacattaggactgcacttgcattataattgtaaatgaatagcgttacctcctctttatgctgtaaatcagttttgggagcatgataatacactttttgttaattttaaagatgataacctttcaatagtagagatcgagagccatttttatagaataccttgaaatttttttcaagtattcagtttattgatgtactcaagttttaactttttctt

SEQ ID NO: 5448 - DNA, 661 bp, Homo sapiens
  TMC2
  misc_feature [331]..[331]: Chromosome 20, SNP identification no. = rs6050260
  misc_feature [331]..[331]: allele = c, t
  misc_feature [331]..[331]: n is a, t, c or g
ccttttcctttatgttattaatttttttttatttctgggataacctcagtcacggtacattacttttaattccacagacacgtttgattttccgatattttatttatgatttttacatacattttcataagattgatatgaatttgtgtgtgtttgtacacaagtgtatgcatgtgcagtatcttggcagattttaacattaggactgcacttgcattataattgtaaatgaatagcgttacctcctctttatgctgtaaatcagttttgggagcatgataatacactttttgttaattttaaagatgataacctttcaatagtagagatngagagccatttttatagaataccttgaaatttttttcaagtattcagtttattgatgtactcaagttttaactttttcttgagaccatttcaataattcatattcttcctgaaacttgatcatttcattaaaattttcatatgtgttaacagaaagtcgcatatggtagccccataaatttgtaattactttttatatctgttgggtttgaatctttcttattcctttgtttttttgtttttttttctctgtcgcccaggctagagtgcagcagcatgatctcggctcactacaacctctgcctcccaggttcaagcaattctcctgcct

SEQ ID NO: 5449 - DNA, 661 bp, Homo sapiens
  TMC2
  misc_feature [331]..[331]: Chromosome 20, SNP identification no. = rs6083735
  misc_feature [331]..[331]: allele = g, in linkage disequilibrium with rs6050260, respectively
  misc_feature [331]..[331]: n is a, t, c or g
tcatatcagaggttgctaactcaatcggaccctccaaatcagaaatcgtacagagaatttctcactttatctacaaactgtccaaaccagaaattttatcagcacagtaaggggtggccctcacttgtctctcactccaggcctgacgttggggaagtaaaggtttgaacacctgcctctggcagcctgggctcaaggacagcaggagctggggactgcaagacagcagcttcacccatgctgactcatgctgacctgtcggcctcctcgtgcccctcatcatgcccctttgtgctccaggttgacatgttaaggaactgagagttttacntcttttatttcagaaatgggtcaaatttaagagagactttgataatttcaagactcaatgtatcccctgggaaatgaagatcaaggacattgaaagtgagtatgctggtgtcactgtttttttaattggtttcctaaagcgtttcccaagagcttggattgtttccttggccctctgaatagattatttcattggttctgttgtattaggaaaaaagaatgagttttgaacttgtcaggccaagatttattttttatttatttatttatttatttatttatttatttatttatttttatttatttttgagacagagtctcgctctgttgc

SEQ ID NO: 5450 - DNA, 661 bp, Homo sapiens
  TMC2
  misc_feature [331]..[331]: Chromosome 20, SNP identification no. = rs2325890
  misc_feature [331]..[331]: allele = c, in linkage disequilibrium with rs6050260, respectively
  misc_feature [331]..[331]: n is a, t, c or g
tggctttcttcttggaagcttttattccatgagaagagagcacatttaaatgccacaggcctatgagacatctctgaaattttgctgtgcagtggtccataaaaggcaggtttgggggaagttgagcaattttaaggacactcggttgctttttaaaagagaacattaaatttggtataatttatgtaagtttttaatatttttatgagggaacatttattttaaacaataaaaacttagtgattggtgcattccaatgaagcagccaagatctgaaccattcgtgctagagaaccttgatttgattggcaggtgattgggaaaaccatantggagtgggttgagagtaagagagagagagagatgctttgctggaaagaggagccttggcttgggaagaaggagaagggaagaagggaaataggggagaagggaagaggcttagaccaggtagcagcctgttgcagtaggtcagtgctagatccgggtaatatcaatgggaatggattaaaagagaggaatcagagtgaagtgcacggacaagtcttgatgacaggttggataacagcaattagggtgtggggtgtctcaagatgccttcttatttaggatgatgggaaattggccatatgggaatcagacacatccaaattcattgcac

SEQ ID NO: 5451 - DNA, 661 bp, Homo sapiens
  TMC2
  misc_feature [331]..[331]: Chromosome 20, SNP identification no. = rs2325891
  misc_feature [331]..[331]: allele = a, in linkage disequilibrium with rs6050260, respectively
  misc_feature [331]..[331]: n is a, t, c or g
ggcaggtttgggggaagttgagcaattttaaggacactcggttgctttttaaaagagaacattaaatttggtataatttatgtaagtttttaatatttttatgagggaacatttattttaaacaataaaaacttagtgattggtgcattccaatgaagcagccaagatctgaaccattcgtgctagagaaccttgatttgattggcaggtgattgggaaaaccatactggagtgggttgagagtaagagagagagagagatgctttgctggaaagaggagccttggcttgggaagaaggagaagggaagaagggaaataggggagaagggnagaggcttagaccaggtagcagcctgttgcagtaggtcagtgctagatccgggtaatatcaatgggaatggattaaaagagaggaatcagagtgaagtgcacggacaagtcttgatgacaggttggataacagcaattagggtgtggggtgtctcaagatgccttcttatttaggatgatgggaaattggccatatgggaatcagacacatccaaattcattgcacatctaaaggaagtgtcctgttggtcaaagacacagagaacttcagggctcaagggttttcagcataagctaaggttcagagatatccccacgacccatggatgt

SEQ ID NO: 5452 - DNA, 661 bp, Homo sapiens
  TMC2
  misc_feature [331]..[331]: Chromosome 20, SNP identification no. = rs11087509
  misc_feature [331]..[331]: allele = g, in linkage disequilibrium with rs6050260, respectively
  misc_feature [331]..[331]: n is a, t, c or g
tctcctgggatccactaacagagactctgatataactggcctggagtagggtcctgacattggtttttcaaaagctccccaagtgattagaatactcagaaagagctgagaaccctggtttggggctgtgggaataaagaaatcaacactgatggctgcgccaaaatctcagaaatcaccactgaagaacttattcatgtaaccaaacaccacctgttccccagaaagctagtgaaatgaaaaaaaaaaaaaagaatttgaacttggtagttggaaaataacaaagagagagaaagggagacagagtgaaagcttggtgacagaaggctancaatatggtctgtgcagatcagtcccacaggggctgaggtgggcaaacctttgcacgtgtgtaggattctgactgagagggttccttcacagaccttgcctctactttatttatttatttatttatttatttatttatttattgagacagagtgtcgctctgtcacccagggtggagtgtagtggcaaaatctcagctcactgcaacctccggctcctgggttcaagtgattctcctgcttcagcctcttgagtagctgggattacaggtgcacatcaccatgcccggctaatttttttgtatttttagtagagacatggtttcaccagg

SEQ ID NO: 5453 - DNA, 661 bp, Homo sapiens
  TMC2
  misc_feature [331]..[331]: Chromosome 20, SNP identification no. = rs6037081
  misc_feature [331]..[331]: allele = t, in linkage disequilibrium with rs6050260, respectively
  misc_feature [331]..[331]: n is a, t, c or g
tctttcccccaggacctagcaaagctcacattacactacaactgcgcttcgttctcttttctttgcccctcccctctcttgaattccttcctgctgtccactgactgatgcctgcagatggcagggacacccactaggaaaagggcttgagctcagcaactcacagcatgggtttcccagccctagagcccggtgggctttgcagtgcatggagcagggagctgactctgtctcctctccttctccttcttacagcaatggggggcttatggccacttccatccaaagccagggtaggggtgactgggggctttgacttttcctccaggantgtgagagagggacaaagaagatcaatgtctttgaaacactttgaacatgtgagaagtaaaatgacttcttttgtaagtttattaaaagagacataatatacttgtataacagaatagatgtgaaaattctgtgaattaagactttggggtctgggagagctcatttttcatcctggttctaccaattactctgtgtctagggcacaagtttaataatcaaaaatcaatttttatatactaacagaaaacaattcgaaaataagtttaaggccaggcacagtggctcatgcctgtaatcccagcactttgggaggctgagacaggtggat

SEQ ID NO: 5454 - DNA, 661 bp, Homo sapiens
  TMC2
  misc_feature [331]..[331]: Chromosome 20, SNP identification no. = rs7266213
  misc_feature [331]..[331]: allele = t, in linkage disequilibrium with rs6050260, respectively
  misc_feature [331]..[331]: n is a, t, c or g
ataacaaactgatatactatgcatttacactatgtcttaatatctgatagagcgagttttctcatcaagctccacaataaaacacattaaggttttattgtgataacacagaatccataaacctctttcgggaatttgacatctgtggtcgtttgtgaaaatggctacaaattcttcctatccttgtatgcacatccctttgctttcctttgcacattcacgaagaggtggaatctgtgtcctccatcttttgaatccaccttagcttggtcatgtgacttggtttagccaatggaacaatagcaaccatgaaacatgcagagatttgaanagtgcttgtgtattgagacttgctcttttactgcttttgggaaccctgagaccttcgtcatgtgaataatctctggctagcctcctgaatgatgagacacatggtccagttatctccccaccctggccaatagccagtaaaccaccagatatttgaatggagccatcagctatcagcaggtaaggccaacaaaagaacgacccagttaagcccagtttaaaaaaaaaaaaaatgctgccccacagaatcatgagctaaataaattaataataagaaagagtttatcttgcattcaaacagcaatttaaaaaaagaagacagcctatcttc

SEQ ID NO: 5455 - DNA, 661 bp, Homo sapiens
  TMC2
  misc_feature [331]..[331]: Chromosome 20, SNP identification no. = rs6083806
  misc_feature [331]..[331]: allele = a, in linkage disequilibrium with rs6050260, respectively
  misc_feature [331]..[331]: n is a, t, c or g
aaacccaaagggcagagtttgaagagtgggcctggaagctccaagccccttgcccataccttaccctatgcatctcttccacctggccattcctgagttatatcctttgaaataaacagataatctagtaattaaattgttttcctgaatgatttgcttactctagcaaatgaccaaacccaagaaggggattgtgagaatctctgctttatagccaaatcgaacagaagttgccagtaacctggtgacctaatacttgtgattggcatccaaagtgggggcaggcttgtgggactgagcccttcacctgtggagtctgtgctcactctgnttagtgtcttaattgaattgaattgaattttacgctacgcagctggtatcagaaaattggttggtatgggaaaaaatttggtgtcagaagtgtcaaatgtgtctgacacatttggtgtcagaagtgtcctggaagtaaagtgttgatagtatagaaggaaaaacatataggctgccacaacaaagtaccacagactgagtagcttaaacaacagaaatgtatttgctcaccgttctggaggctggaagtccgagatcaaggagttggcaggtttgctttcccctgaggcttgcaggtgtctgtcttctccctgtgtccttctgtgacctt

SEQ ID NO: 5456 - DNA, 661 bp, Homo sapiens
  LOC128710
  misc_feature [331]..[331]: Chromosome 20, SNP identification no. = rs7262165
  misc_feature [331]..[331]: allele = c, in linkage disequilibrium with rs3748478, respectively
  misc_feature [331]..[331]: n is a, t, c or g
tttggagcagcttattttagacagaatatgaaataaaatagtaggaggactgtggtttgtcctttctttctctcatatgcattactgaccacctctccattttttttaaagagactcaatagtttttgatgaacaacttaggtaagccagaagaaagttagtgtggtaacaagtaatcatttgaggcttcatgctttggaggttgtttgtagaaggataaggagaagtgcaacagctttttacgacatacagagagcaaatggtggcacaagaactggagattttttgggctgcttggaggccaggggagaagatgggatcttgctgatantagatgattgtgttacattaagcaattcaaaaatatcaattgtttctggaaatgcacatacctgcagacgcctggtggtaagatgtttctattgcaaagctttttctccctctaatccaaatcccttcttgtgtctaaagacagtcttctcagatttaggagcaccacagtcgccagcaaggaaacaggcatactgaaatgtgatttgcaagtgcctcataatattaataccatcatccagtagttttcagatgaaaagatgatcactttatgatttccatttgctctgctgactcaggttttctgcatttaaaacaccagcatagcgag

SEQ ID NO: 5457 - DNA, 661 bp, Homo sapiens
  JAG1
  misc_feature [331]..[331]: Chromosome 20, SNP identification no. = rs16991883
  misc_feature [331]..[331]: allele = a, in linkage disequilibrium with rs3748478, respectively
  misc_feature [331]..[331]: n is a, t, c or g
ttaaaaaaaaaaaaaaacaccaaacaaaaaacccacactaagtgttaggtcgtttaatttttaaaacacactaaaatatgttaatgaattccccttttcatttgaattccagaaatgccatcctttttaaactcttctctccaattatttaagaaagcagtagtactacccgggagagctgtaaattccttcccccatgacccacccctctctcatggttgaaaaactcactttgaaattgagtctatcaaaacaatttacctaattatcatgtaaaataagcagagtacattattgctcatgaggggatattatacagttaacagaattncccatcaagttgctatgaattggaatcactgaattctataaagggactgggacagtagacagcacagagactaaaagtgggcccactcctacaccaataggaaagcttgagctaaccacatacctctccccatcaaagccatgcccccaaagacacctagtgaaaacttgctgcaaggctaccctgaatgcaggggctatcatttcctataggatagcctgttcagacaacaactgggctgacctagtcctgtctggatctattttgggtcaagttccttagaagcagagtctgagaaggggatctggacataggtagaaggaattgagg

SEQ ID NO: 5458 - DNA, 661 bp, Homo sapiens
  JAG1
  misc_feature [331]..[331]: Chromosome 20, SNP identification no. = rs6040058
  misc_feature [331]..[331]: allele = a, in linkage disequilibrium with rs3748478, respectively
  misc_feature [331]..[331]: n is a, t, c or g
tcatttgaattccagaaatgccatcctttttaaactcttctctccaattatttaagaaagcagtagtactacccgggagagctgtaaattccttcccccatgacccacccctctctcatggttgaaaaactcactttgaaattgagtctatcaaaacaatttacctaattatcatgtaaaataagcagagtacattattgctcatgaggggatattatacagttaacagaattacccatcaagttgctatgaattggaatcactgaattctataaagggactgggacagtagacagcacagagactaaaagtgggcccactcctacaccantaggaaagcttgagctaaccacatacctctccccatcaaagccatgcccccaaagacacctagtgaaaacttgctgcaaggctaccctgaatgcaggggctatcatttcctataggatagcctgttcagacaacaactgggctgacctagtcctgtctggatctattttgggtcaagttccttagaagcagagtctgagaaggggatctggacataggtagaaggaattgagggaagcagatggggtaggggaaagagctgagcaagaacatggtctcaactggagtctgatttcagcctaatcccagggtaagctctagagtgcaaatt

SEQ ID NO: 5459 - DNA, 661 bp, Homo sapiens
  JAG1
  misc_feature [331]..[331]: Chromosome 20, SNP identification no. = rs1801138
  misc_feature [331]..[331]: allele = g, in linkage disequilibrium with rs3748478, respectively
  misc_feature [331]..[331]: n is a, t, c or g
gaaggtaaacaagtggtaacaggttgtctctgggtaggggcataaacttttcatttctttgccttttttacaacagatagaattttgtagcaggtgcatatgtttttattttaaaaagccaaaatggtcagggaagaaggctgcaatgtgaatattaacatgattcatcactttgtctctagaacctgacagtattattgaaaaggcttctcactcgggcatgatcaaccccagccggcagtggcagacgctgaagcagaacacgggcgttgcccactttgagtatcagatccgcgtgacctgtgatgactactactatggctttggctgnaataagttctgccgccccagagatgacttctttggacactatgcctgtgaccagaatggcaacaaaacttgcatggaaggctggatgggccccgaatgtaacagaggtatgtgtgtgtgtgtgcatgtgcacgtgtgcctgttgcttttagtgtccatttatcaccccaccagcaggcaggtggcatgcggctatctcaggtggggtgggattttggctgttattctgggcctgcagtatgaagatgcggagtgtagaagatgctgttggtgccccatccagatcccctttactggcatccccatcccccaggtgctgtgttggctgcca

SEQ ID NO: 5460 - DNA, 661 bp, Homo sapiens
  JAG1
  misc_feature [331]..[331]: Chromosome 20, SNP identification no. = rs3790158
  misc_feature [331]..[331]: allele = g, in linkage disequilibrium with rs3748478, respectively
  misc_feature [331]..[331]: n is a, t, c or g
tgcccctacccagagacaacctgttaccacttgtttaccttctttaatgggtacacagtatttcattgtctggaaacaccaataaataatttacctagtccctgacatgtgtgcatgtgagtcgtttgggcttcttactattaaacaaagccacagtgagcattccttgaacgtatctgcctgtgtatggttcccacaatgagatactctagaaatggaagtgctgaatcagagtccgtgcacaacaaatcaacctctgtccacagtctcaaactaccagtctgtcctcccaccacccaggaagctgtgtttcccaataacactgccaacnttgtacattatcaaaccttctaatctatgcctgataggtaaagaggtatctcatttaattagcatttaactaagtgatggcaagagccctttctggtagttacaaaaccatttatatttgttcctgtgaacagcaacagcttctcttctctgccaacttttctattacattgccatactgacttgcaagtgctctttacatatgagagacagtagctccctatggaatgttgctcttgaagaaatttcattattccagataaaggtcagcaatcatttctggttttagggttttatgtcttgctcagaaaagctttttgtccatttcaaa

SEQ ID NO: 5461 - DNA, 661 bp, Homo sapiens
  JAG1
  misc_feature [331]..[331]: Chromosome 20, SNP identification no. = rs3748477
  misc_feature [331]..[331]: allele = c, in linkage disequilibrium with rs3748478, respectively
  misc_feature [331]..[331]: n is a, t, c or g
cttaaaggcatccagcttctgaggctggtatcaacaacaaacagtttagacaagagtccagggcaatcctaggggtgcaggactgatatgtacttttcagtcatgcagtaagctttccacttatttccgggaagtgtcgtgcagaggatcacttcagaatcctcagtggagctatggagctgcatacataatttcacacctgctcagggagggggtcgagcatgtctgggttcaaatacgtctgctgcctgcttcctgatcacgctttccttcagcttggggcactggaaaggaatctgtggcagttcgtttggcagtccagccttgtgantggaaaaggacatcaccatgcctccctgcaatccccagtgccacgaagatgagtcacgaagaagccatgaccgcctcgcaggccaaggaggaggtgatgaagggcgagtctgagcataacctgggaccacaccgacccaaaaacctggaagggggccttagccgagaaagctaagctacagggaaaacctggtctgaagtgtgcctatttatgtttacatgtttattatgcattacagtaaactgaaaccatttgctctaggggagaaagaaatttggaactctatataccacagtcccaaaatgtaataaaagactttggaggaccgat

SEQ ID NO: 5462 - DNA, 661 bp, Homo sapiens
  JAG1
  misc_feature [331]..[331]: Chromosome 20, SNP identification no. = rs3748478
  misc_feature [331]..[331]: allele = c, t
  misc_feature [331]..[331]: n is a, t, c or g
cagtaagctttccacttatttccgggaagtgtcgtgcagaggatcacttcagaatcctcagtggagctatggagctgcatacataatttcacacctgctcagggagggggtcgagcatgtctgggttcaaatacgtctgctgcctgcttcctgatcacgctttccttcagcttggggcactggaaaggaatctgtggcagttcgtttggcagtccagccttgtgactggaaaaggacatcaccatgcctccctgcaatccccagtgccacgaagatgagtcacgaagaagccatgaccgcctcgcaggccaaggaggaggtgatgaagggngagtctgagcataacctgggaccacaccgacccaaaaacctggaagggggccttagccgagaaagctaagctacagggaaaacctggtctgaagtgtgcctatttatgtttacatgtttattatgcattacagtaaactgaaaccatttgctctaggggagaaagaaatttggaactctatataccacagtcccaaaatgtaataaaagactttggaggaccgatgacagaaggaccagccttaaatactttcaaatacataaacagcacctaggctatatttgggcccgagtctgcctgtgagggctcactgcagagctgatagaagga

SEQ ID NO: 5463 - DNA, 661 bp, Homo sapiens
  JAG1
  misc_feature [331]..[331]: Chromosome 20, SNP identification no. = rs12624962
  misc_feature [331]..[331]: allele = g, in linkage disequilibrium with rs3748478, respectively
  misc_feature [331]..[331]: n is a, t, c or g
ctgagggtgaagaaaggaacaaaacactccaagtagcataaacagcatgtgcaaaggtcctgaggccagaaagcatgtgatgtagttgaggataggaaggcaactgctagggtatggccaggctacagatacgatggacaacacggtgtgtaagacaaggctggcagggagacaaagctgggctgcacagagccttgtgggccacatgaagatctgtcccaagagcaacagaaggccaccaagtggttggtttttcataataagggtgacaagcaaatgttatggctctgaaaagaccaggatggcagaagaatggagaaagcactagagntgagtcagagcagataaaggtggaccagacgaaggctactctaagttcagtcatgagcagatggtgacttggaccagggcagtggcagaaggcaggcagattcaagtgaagagctggagagatttttcagaacttggaggtggactaggtatggatgctaacagagagggggtacacagatcgccttctatatttctggcttatggcaatgagtgttcaaatatcggtgccagacacccagaaggggccctgggaagggactgcttttggcaagagaagatcctgagtttggttttgactgtgctgaattcaagattccttggaagcatc

SEQ ID NO: 5464 - DNA, 661 bp, Homo sapiens
  JAG1
  misc_feature [331]..[331]: Chromosome 20, SNP identification no. = rs6032915
  misc_feature [331]..[331]: allele = t, in linkage disequilibrium with rs3748478, respectively
  misc_feature [331]..[331]: n is a, t, c or g
caaacccatctccctcttcagggttcaccaagtgagttttgataacctgcaatgggcacccttgaggtttaaaagaactttattcctacctcagtctttcttgtcctcttccagggatttgattacccccccaggagatgaaacatcctagaaccccaaaatcgggctacctggaaatgcagacaactgtgggtagctctggacaagccctgggttcccaggggacataactccctgacctgcgaggtgacaggaggtccaggaaaggtgctgtgaatgctgcagtgtggcggggaggtctctcacatgtccctaacaagtatactgaccnggctcttatcacaggccaggatcaacctcaagctgttcactctaccgggtggattgtttcaatagctaaaagggaggggaaagaacaccatgtcgacaccatactattacagaagagcctatgtctcccccctcctcaaccccttctgcctaacgcttagttaccattgtaagcaggtcacagtgacataatgttcacagtcctcaacgtttgtggcagggaggggagaacaaacaggtgtctatgaccctgactggcatcagccatagccaaggctgacagagcttccctgccacccccacacacacccccccacggcattacagggta

SEQ ID NO: 5465 - DNA, 661 bp, Homo sapiens
  misc_feature [331]..[331]: Chromosome 20, SNP identification no. = rs6029126
  misc_feature [331]..[331]: allele = t, in linkage disequilibrium with rs2207135, respectively
  misc_feature [331]..[331]: n is a, t, c or g
agacaatagagtgttctctttttgcacaaagaacaaaacagaacatcaagagtcttagtgatttattcaagtcacatgagttcaatgagtagggaactgcatcaagagacagcttccagttaattttatgaaccttatatgcattgcccaatatgagtgttcaaccccatggttccctgttttttttgggttttttttttttttgtcttttttttgttttgtttttttgtgcaatcaatgacctaaattctagggaagttagggtagaactagagaagacagggaagagcaaaagaaaacaaaatgtgctcagtttggttccgaggaaggntgcggaagctggatccagatggtgggggtttggggaactggataaatcaagagagttgaggtccttggaaaaactgaagacggatgttttcaaggacatagaaacatggctcgtagcaatgctcctggaggcccagcagagaccagcaatacttgatctcggggatcaacattagtgtcttaatgctggttattgtcccaaagtaagtaaggtgtgcagtgttcaagatctgtcccattccaatgatgaggaaaccaaggaccaacaagaggtgtgcattttagagcccctccccatcccaggccaatgaccacaaaaccgattctgtcc

SEQ ID NO: 5466 - DNA, 661 bp, Homo sapiens
  misc_feature [331]..[331]: Chromosome 20, SNP identification no. = rs6029127
  misc_feature [331]..[331]: allele = t, in linkage disequilibrium with rs2207135, respectively
  misc_feature [331]..[331]: n is a, t, c or g
ctttgtccatagatctttacatctctgagtacttccctaagtgaacacttcacaaaagagttgtttgactcataagaataaaaatgtttaaggctcttgatgcatttccctaaggaacccacttagcatctccacaacagggtttgagaaggtaaaaattagaactctttttttatttatttgtgacttatttcattacagttgagctgatttttcagtttattagccatttacatttcttagtagtcaacttattgttttatgttaactcacctcactgatacagtaataaatttggtgttcctttagtgtaggtatgggaaatttcttnaaaaatcaacaatattcttgtctggaacactgaattattttctagaatgcagatgcattgtcgacttatatgagtgctcgtcctggaaggaaacagatggtgccctgaacggggataaccgaggagagtttattatagggagcatttacaagggtgtgagcagggttaaggagacccagaagagttggtgcagcatccgggggctggcaacacagaggagccattacctcccctcagtttaaaggggagggaagagcctggagagagtagctgtggttgtcagagaagcactaggcagggcaggatgcagccaaccctcagaaggtaata

SEQ ID NO: 5467 - DNA, 661 bp, Homo sapiens
  misc_feature [331]..[331]: Chromosome 20, SNP identification no. = rs6016360
  misc_feature [331]..[331]: allele = c, in linkage disequilibrium with rs2207135, respectively
  misc_feature [331]..[331]: n is a, t, c or g
gctgtagctccaactggctccgcctcctctgtgtgtttcccttccttgatgcttttaaaggaagttgctgtcggatggaaggcaaaacttaggttttctatggcacagttttcaggaagggcaagtcactctttggctctttgggaaactccctcaccccataccccactcagaccacctccaaatgctctaggctgggtctgccatcaatccctgataacagacacccaagggagatggtgtagcaattccaccctgcaccctgaggctgcttgtctcagcatgcaagaacagcctgtgctgcggcaggaaaagtctcctcgagcctgtnaaagagacgaaggagagcagggcattacatataagccagagtgacttggaagtctgcagcctgtctccttcgaaggaagacagacaacatgtataagaataatggcttacatcaatgggccccaacctctggccacatactaagccaaccatttcatcctcatgacaatccagtgaggtagggactatttttatccccattttacagattagtaaacaagattagtaaacacagagaggttacaacttgctcaagttcgctctggtgccttgagctggtgagatggaggaagtgaaatgcaaagttaggtgggtctgaccccaaaccctt

SEQ ID NO: 5468 - DNA, 661 bp, Homo sapiens
  misc_feature [331]..[331]: Chromosome 20, SNP identification no. = rs7272909
  misc_feature [331]..[331]: allele = t, in linkage disequilibrium with rs2207135, respectively
  misc_feature [331]..[331]: n is a, t, c or g
gtgggaggacctttggagcccaccaagcctggattcaaatctgccccctaacttgttagccaattgaccttgaacccttccttgcacattgttcccttcatctgcagaaggtgattgacaccattgccctgtgcagcctatcagctacaaatacaggtctggggtcaggctgcttgggtttgactcctagcttaccgatggggtgtccttgggcaagcaccttgtgttctttcttttattttctcatctataaaatgggtatagacatacctacatcctgtgactatggtaaggaccatatgtactaaaccatgtaaagcctttaacccantgatgatggaggttgcaaattttttctgtgaaaaattggaccttggcgatgaccttgaggagtaggatataaataactcccacaagcttagtgttccaataacggaatactaggtatacatgggttaagacagtgctcttaaggataagatgttacttgttttgattctccaaaatttggggcttggtgtgaggccaaaaacatgtgagtagttggcacagtgccaacacttagtgtttgcatctctttcttgcggaaagccagattcagtccaagccctgcttgggggtgagagtaaggtcccttctgcaaacccaaaaaggggtccca

SEQ ID NO: 5469 - DNA, 661 bp, Homo sapiens
  misc_feature [331]..[331]: Chromosome 20, SNP identification no. = rs8115272
  misc_feature [331]..[331]: allele = t, in linkage disequilibrium with rs2207135, respectively
  misc_feature [331]..[331]: n is a, t, c or g
ggtttaaagggcatagctggagaatgctaggcattgtctaagacaagaaagagatgctgaggtccaggagactcccttgtgtctaacagtttattcgagaatagcaaatgcccgcctgtctgtgaccagtgttttcttggagccaagaattatgcctcttgggcattttgaccaccccagaagatatatgccatttttactgaatagaggagaggaagaaaactcagatttatcccctacccactattagccagaagttatgctagcactgtgacaaatgtcatttcatttattttcacaactacccttctgggctgttattatcacctcntggaaacaagtaatgtgaggctgaagggaactaagcatattgccttaagtgacagagcaaataagaggcaaacttgtgatttgaacccatgtctgtgtacacccagagtcagtcctcccctccctcctgccgccatcagatggaatcccatctgtgttctgggtatcagcgtcctctgaggagttcactaaaatgtgcattccagttgaaatctgaatttctaggagtcagtcccagaaatttctatgtaattcctccctgccctcaacaagggattctggtacagaacctggtttgtaaactaacgttttggaagttaggttgacgttt

SEQ ID NO: 5470 - DNA, 661 bp, Homo sapiens
  misc_feature [331]..[331]: Chromosome 20, SNP identification no. = rs6016361
  misc_feature [331]..[331]: allele = a, in linkage disequilibrium with rs2207135, respectively
  misc_feature [331]..[331]: n is a, t, c or g
agactcagactcaaccattcctctccatcccaggctcagtgaggagaaaaatcaatattcctaagtgggaaaagacccaataagttgctgaaaaagttacttccatttatatgtttgcttttaagtggtcctctttggggcagttaaatggcaaagtggccggagcacagaagaggtggcagccagcccagctcccctctcactaccttgcaaccccagaaaagcaaataacctctccaaaccttgcttccctgtttattagtatttatttatttgattttcttaagtttgccctttgtggtaagaaatcacctcagggcacaggcacaanagagtaacaattcattaaactacatacaactgagctgagatggctgacagcctcgaagtaagagacagccagacaagccttttttaaagctttggccccctaacttgccagaactaccgtaggagtccaagaacgcagcaaggaagcactcactagatagggagagaggctccagctcccagagatcttgggaggcgttagcagcagtgcccaggcaggctgaccatgctctaggagcaaagctcatctcaaaaatgtggaaggttggccgggtgcggcggctcacgcctgtgatcccagcactttgggaggccaaggcaggcggatcat

SEQ ID NO: 5471 - DNA, 661 bp, Homo sapiens
  misc_feature [331]..[331]: Chromosome 20, SNP identification no. = rs6029132
  misc_feature [331]..[331]: allele = a, in linkage disequilibrium with rs2207135, respectively
  misc_feature [331]..[331]: n is a, t, c or g
tcctccctccctagaacataagccctgtaataatgggaaacttctcacctttgtcttcttggtccccattacctagaactatgtctagcacagagtaggtactcagtaaatatctgtagaatttattaagcaagccaagaatgactggagtacataaacatgaaaacatttggacgttgtttaaaactaagcagattactatgttgagtgtctcgatgtagctgagaaaacaactatttcataaggaacagagtgaaataaaagtcgaagggtttaaatttttttaattagtccttttattctcatgttttgcagactaatagcaaccacngacttagacacatagaaggattttatgaattgcacatctctcagcagggtctgactgcctgcatggacagggagggtgagtcccagtccagataaccatgaacatccatgagtaattatgaccaagatcctattaccaagccaaaccttgcactaggagttaggcatgtgttactgaggtcagcagttggctcttctgtccactgttttgtgccagcccagacaacttaatgctctaccagtgattatacaaattgtgctctcactttttttttcaattacagaagtagagaacatgtcatgatccatacggagaaggaacagagcactg

SEQ ID NO: 5472 - DNA, 661 bp, Homo sapiens
  misc_feature [331]..[331]: Chromosome 20, SNP identification no. = rs6016364
  misc_feature [331]..[331]: allele = t, in linkage disequilibrium with rs2207135, respectively
  misc_feature [331]..[331]: n is a, t, c or g
ttttgattatttagtctataaacaaaaaacataaatacagaagtcaatgaatttttgtctatttataagtaactatccacgtccatagcttcaggaagttttctcatgctccttactgggcaatatccacctcctaccccagagtaactcctttcacctttgtgaaagggtgagagtgacagcggtgttgttgtgtaaggtatgattccaattatataaatttcaagtaagaggaaaattaaacaaaagtgaaagaaggtgacttctttagatattagcaattttactacctttggatattgataaataccttgacctataagattaatanagtttaattataatctataggattcagatacttatcttaatattaatatttttagattgttagctatctcttgagcttgagtttttagatattagtaattttcctcattctcaaattttatattactggaatcatacattatgttctctcttgtgtctgtcttctttagcgcaatatggtatttataagatccatccattttgtggcatatatccttagtttactaatttttattgctgtgtagtattctaccatatgaacacaccacagtctgtttattttcctgctgatgagtatttggggctattatgaaacggctgctgtgaacat

SEQ ID NO: 5473 - DNA, 661 bp, Homo sapiens
  misc_feature [331]..[331]: Chromosome 20, SNP identification no. = rs6016365
  misc_feature [331]..[331]: allele = t, in linkage disequilibrium with rs2207135, respectively
  misc_feature [331]..[331]: n is a, t, c or g
tgagagtgacagcggtgttgttgtgtaaggtatgattccaattatataaatttcaagtaagaggaaaattaaacaaaagtgaaagaaggtgacttctttagatattagcaattttactacctttggatattgataaataccttgacctataagattaatacagtttaattataatctataggattcagatacttatcttaatattaatatttttagattgttagctatctcttgagcttgagtttttagatattagtaattttcctcattctcaaattttatattactggaatcatacattatgttctctcttgtgtctgtcttctttagngcaatatggtatttataagatccatccattttgtggcatatatccttagtttactaatttttattgctgtgtagtattctaccatatgaacacaccacagtctgtttattttcctgctgatgagtatttggggctattatgaaacggctgctgtgaacattcttgtacaagtcttttttgtgaacatgtacctatgtatgaatttctcttgggaatgatttctctagttcataggataggcagatatttaactttattcaaaaaagccacagagttctgcaaggaggttgtaccatgctgtcatttgcttttaaaataactacgttttga

SEQ ID NO: 5474 - DNA, 661 bp, Homo sapiens
  misc_feature [331]..[331]: Chromosome 20, SNP identification no. = rs6029134
  misc_feature [331]..[331]: allele = a, in linkage disequilibrium with rs2207135, respectively
  misc_feature [331]..[331]: n is a, t, c or g
tcaggaaccattgaatttttttctaggacaaacgtgtagccctttctgcccttaaaggcaagaaccgcaggaaatcatgtgtctttactaatagggttgcatacaccatcctcctggactgtgctcttagaattagtaggatctggaacaaaaaggagtatctctcacgatcaccagtaccccaccactaccataaccagcgtcaccatttccatgactggattcacaacaacaccactgttactctcaccctcgtcacttcccttgcctgtctttcccacataattattcttctggccattcccactgcagtggataatctattgtctgnatcttcccaacacacctctttccttccctttccccatgtcatgtggttccatcactggtccaaaatttgagcccaagatacgaatacatctgttttactgatattgggaaagactctttttttattctgtcactggaatcacaaggctggtctgggtaagtctaaaattgctagagattactaattgccaacaggagaaaaagagcttatttaacatgaaatatacaccgaagggagcaaatcagaaaagagggggaaaaaaagagagagaagctcttttaaaattgttgagccacctggattcagccatgcccatagttttagttattt

SEQ ID NO: 5475 - DNA, 661 bp, Homo sapiens
  misc_feature [331]..[331]: Chromosome 20, SNP identification no. = rs6016366
  misc_feature [331]..[331]: allele = t, in linkage disequilibrium with rs2207135, respectively
  misc_feature [331]..[331]: n is a, t, c or g
tggacccaggaagtcccagatatgccccttctttctgcttctctcagagtcttttgctccaatcttctctcattctatgcactagctttctcctagcagttcccagaggatccagagcctagacagccaaagcattgaaaaccactgtgaaagatttagaaatgtaccaccagaggaaacaaaatgctattttaaaataattgccttctaaagatggccaaccctatgaaaagaaagacccaaatagctccatttcattttcttctgggtgctactaatggaaagcagcctagtacggtggatgagagctgactccacattctgctagctncatgactttgggtaagctttgccccttgcaaaaataaaaagaaataaggccctcttcagaacaatgttcatccatggaaaacactctgtgagcaggggctaacataattattaatacaaaaggggtagatgaccagttcttttgattgaaaacacgctgaaggattgtggacattcaaagataaggcagaagatacctttaaaattaggaatcagatattatagactcactccaattaacaaagagagaagaattccaagtttcccagaacaaactgggaggagagaaacggagagagagaaaagtagtatggcaagagaaggaagctta

SEQ ID NO: 5476 - DNA, 661 bp, Homo sapiens
  misc_feature [331]..[331]: Chromosome 20, SNP identification no. = rs6029140
  misc_feature [331]..[331]: allele = t, in linkage disequilibrium with rs2207135, respectively
  misc_feature [331]..[331]: n is a, t, c or g
aagcaataaaacaagaagaacattgaaatgtaactattagaaaaaagaaaatgaatttatgaacacttactcatgacattaccacacatctcaaatcctaagacaatcaaataaaaatgtgttaatttgaagattgagtataagggcttgatataaaataaatatacattttttcaaaattgcaataataacatattagaaaactaatggaaatctatcatctttgtaactttaaaaatatttaatacctcctatatgtaatttaaaatataaatcatctagaaataagctaattactaaatgtggaaaaaaaagaatgagcttacataantgatgacaaagagattgtctattaaattatggtgtgtccataagtaatactacccagtcattaaaaatcgtgtttttgaagaatgtttaaaaacttgtcaaaaagttgtaatatagggttaggaaaagattcatgatacaaaatactatatgcaatatcatctcaaatgtgtgtgtgtctctgtcaacatctgtctctgcttctaaaaagaggtcaatagaaagagacctgaagacaagctgagctgttgctctggctccctcatctcagccaatggcttgttccccaaagctgcccccaagaccacagcctggtgccaacgatgcgtga

SEQ ID NO: 5477 - DNA, 661 bp, Homo sapiens
  misc_feature [331]..[331]: Chromosome 20, SNP identification no. = rs6016367
  misc_feature [331]..[331]: allele = t, in linkage disequilibrium with rs2207135, respectively
  misc_feature [331]..[331]: n is a, t, c or g
aactgcagaggctatcagtgcaatgtgaatggtacaaagttgggtcccaaacacagggctggaagtccaccagtatctcactgcccatgatgggtaggattgccaggagtagcaaataagaacacagggcagttagattttatttctaataggcaatgaattattaaaatgtggggtataaaagcatgtcccgaatgcataagtatgtatttttcttctgttcattgatacatcccagacccccagactatgcctgacatgtagaagacacttaataaatatttctctaccatgaacaaatttctgaatatgtaggcaggaccccacgaanggtatgaaataaaagatttataataggaattagccctaatatgactgttggagctggtggaaaagtgtacagaaggctatagactctgcatctggtggtggatctgaagttgctacaggctagcagggttggcaatcaggatatcaaatgatgtgaagaagaggagaggaaggaactgggatccacatctctctctctccatgtctaaccttgacaactggtaactttcagaagaagcagacaccatttgtcatagagctgcacatatacctgaaccaggctcagagaaactgatcaacaagatccagtggaaggagctgatcagcaaaa

SEQ ID NO: 5478 - DNA, 661 bp, Homo sapiens
  misc_feature [331]..[331]: Chromosome 20, SNP identification no. = rs6029141
  misc_feature [331]..[331]: allele = a, in linkage disequilibrium with rs2207135, respectively
  misc_feature [331]..[331]: n is a, t, c or g
gatctgaagttgctacaggctagcagggttggcaatcaggatatcaaatgatgtgaagaagaggagaggaaggaactgggatccacatctctctctctccatgtctaaccttgacaactggtaactttcagaagaagcagacaccatttgtcatagagctgcacatatacctgaaccaggctcagagaaactgatcaacaagatccagtggaaggagctgatcagcaaaatcatacaagggctgtagcagtgtgtggagccctacactttccatgattgcgttaatgatcttcagagtaaaatgagagctgcttcctttccaccttcctcntctcaggtaaatttctcttgtggccaaccctaacctagaaccatacaaggaggggaatgtggggaaacatagttccatctttgctaaattggcacagttcaaaaccatcaccatctaccctttgctcaacttggcatccgtgcataactcttttaataatacccaaataaagacaccagcaaagtcatatttctgcttaacatgatccaactattcttcaaacagttgaaaacatgctatcaccccaaaagaggatacaaagtcccacatgtcactttagccatctctgggtaatgttcattcatcttgcagctaagccacacctagtca

SEQ ID NO: 5479 - DNA, 661 bp, Homo sapiens
  misc_feature [331]..[331]: Chromosome 20, SNP identification no. = rs2207135
  misc_feature [331]..[331]: allele = t, g
  misc_feature [331]..[331]: n is a, t, c or g
ccctgtctcgtagggaagtgacctccctcacgtgcctgagaagatgcatgtgatgatggcgtgccccaggcaaacaaagggctcttgcaaaacctatgattctctccttgttgcagaggaatgaaagggagggaggaagtaggcacccctccttcttgcatggcccacaaggggtcttaaggctatttttatgaagatggactctgggtgattcagggactcaccctaaaagcacttctttcttgctttccttttccttctcctccttctccttcctccttttctcttcctcttcccttttcttttaataacataccttctatgcattttnttgaactttctcccatagaaggtaaccctcagaaaacagtgaactactctaggctccaaggggcttagtaggagagcttgttcattctgtggtttgcaccagcctggcagctggagagcacaagacaatgctcccaggagggcggtaaggcataaacctggttcacagaactcagagaggcttcagagacctggaactaataggctataatgtcaatgagaagttcaggcccagcagaggaggtgagcaagatgggaccctgctcttcctcctattggtcagactctatccattcttgcatgctcggctagagacatttttctcttgata

SEQ ID NO: 5480 - DNA, 661 bp, Homo sapiens
  misc_feature [331]..[331]: Chromosome 20, SNP identification no. = rs6513669
  misc_feature [331]..[331]: allele = t, in linkage disequilibrium with rs2207135, respectively
  misc_feature [331]..[331]: n is a, t, c or g
gtgagtccctgaatcacccagagtccatcttcataaaaatagccttaagaccccttgtgggccatgcaagaaggaggggtgcctacttcctccctccctttcattcctctgcaacaaggagagaatcataggttttgcaagagccctttgtttgcctggggcacgccatcatcacatgcatcttctcaggcacgtgagggaggtcacttccctacgagacagggaggaaccctgggcaactgtggcttggaaatgaaaccagccctttcaatgtatctctttggtgaccaggatggttggtcctgcttggagtctgaggttagggggcaanattctgtgaatgcctaccctgtgctgcatcctcagctgggcactgtcccataggctctttagtccccacctcaacctaaaagaggaaactagtgtagccatggcatacatggctaagattttaaggatccaaggggctgtgacattggatcaaagacttaaaggtggcaaatggcagagccgtcttccaggtggaaccagagacccattcctcttgtgctcccagcaccaactgcttccctccctcagagcctttaaaacactgcactgcttgtctctctctccattatcctgagtgctcttgcaggtcaataactagttctgcactcct

SEQ ID NO: 5481 - DNA, 661 bp, Homo sapiens
  misc_feature [331]..[331]: Chromosome 20, SNP identification no. = rs6029145
  misc_feature [331]..[331]: allele = c, in linkage disequilibrium with rs2207135, respectively
  misc_feature [331]..[331]: n is a, t, c or g
caagagtcaacatctctgcaacgtaagccttctggtatctgatatccccaccatctgccctcactcttgccccagagcgtctccaggtgagcagagattatgattgccaaagggagccatttcaggcctcagacccccaagcttcaccagagaaagcccctgtcctggtaaaatatgatgtcactttcccattcagccttggttagctgttctatgagccaggcagagtagggatctgttcatatctatacttgcccccagggagtagcaacaatggactcatgatataagaactcagtgaccagtggtacctgccagtggcccacaaaantgtattgttgagctgacttcctccaagtttttggagggggtgggtggaaccagagctgggcctggttccactgcagagtgtgcaggtcactagaacaaccaggagaaggaaatctaatggctggatcacagttattgatgttacacctctgaccttttctcaaaacctttgcaaaccattgtttggatttgcaatactggaaactatcagcggaaggtcttgactgtgagcaaagataaagttatgaactctgggaactgcgctgtgccagaaaagtgcttcccaaggtttcatgtgcagacaaagcacctggggatcttgctaaaatgc

SEQ ID NO: 5482 - DNA, 661 bp, Homo sapiens
  misc_feature [331]..[331]: Chromosome 20, SNP identification no. = rs6029146
  misc_feature [331]..[331]: allele = c, in linkage disequilibrium with rs2207135, respectively
  misc_feature [331]..[331]: n is a, t, c or g
aacatctctgcaacgtaagccttctggtatctgatatccccaccatctgccctcactcttgccccagagcgtctccaggtgagcagagattatgattgccaaagggagccatttcaggcctcagacccccaagcttcaccagagaaagcccctgtcctggtaaaatatgatgtcactttcccattcagccttggttagctgttctatgagccaggcagagtagggatctgttcatatctatacttgcccccagggagtagcaacaatggactcatgatataagaactcagtgaccagtggtacctgccagtggcccacaaaattgtattgntgagctgacttcctccaagtttttggagggggtgggtggaaccagagctgggcctggttccactgcagagtgtgcaggtcactagaacaaccaggagaaggaaatctaatggctggatcacagttattgatgttacacctctgaccttttctcaaaacctttgcaaaccattgtttggatttgcaatactggaaactatcagcggaaggtcttgactgtgagcaaagataaagttatgaactctgggaactgcgctgtgccagaaaagtgcttcccaaggtttcatgtgcagacaaagcacctggggatcttgctaaaatgcagacactg

SEQ ID NO: 5483 - DNA, 661 bp, Homo sapiens
  misc_feature [331]..[331]: Chromosome 20, SNP identification no. = rs6029153
  misc_feature [331]..[331]: allele = c, in linkage disequilibrium with rs2207135, respectively
  misc_feature [331]..[331]: n is a, t, c or g
ccatcagtacaccaggccccactgttgtgtgcagactctgcatgggacaggaagcatcagctcttggactccccaagaagggcgtctgcaccagcctgggctaccatgggccctgcagtattgatcaccagtattgcagagggaacatttgcctttattcccctttcaaataattaaagtataatattttatggcctgataaaatttactgagacccttggcacgtaattatagtgcttctttaaaggagaccccataaaagatgcatgattagaaagttaaggatctggatagaattgcaacgatgtgacaaataatttacaagtgatanactgtctgagggggaagaaattccaataacctctgatgaaggctaacaattaaaataataaattccccaagatcaagggtaaaccttttttcttggtcaaagacttagactccacaggcccaggaacaagaacaaaccttcttgtcaaagtcaagtcctggtttctccggacatctgttctttatttctttatgtgtctatcttttgtatgtaggcatttacatatttaacttttttcttaatttatttatctactaattattcatttttatttatagccattctttcactccctcattctattaattcttccttccattcatctattca

SEQ ID NO: 5484 - DNA, 661 bp, Homo sapiens
  misc_feature [331]..[331]: Chromosome 20, SNP identification no. = rs6093933
  misc_feature [331]..[331]: allele = t, in linkage disequilibrium with rs16988700, respectively
  misc_feature [331]..[331]: n is a, t, c or g
ggcagtgctgggaaactcacttgcatggtggctggggcctgaagatgcagcagaagctaacggcgtcttaaaggctgatcccagaactgacggagcatcaccccgccatgcttcatccggcaaggcagggcctctcagcgtaggccccattgacactggaatggtctcactctgtttgcggagggcagaggaattggaggaggttgctctgtgttccaggatgtttagtggaatctctggcttccactcattgtcagtagcacccccaccaggcccaacaactaaaagtgtccccagagattgcccaatgtcccctggaggacaaagccancctggattgagaaccactgggttaaagtaagtaacaggatcagcacagctcccagggcaggggctgtataagcgtgggaacggcagcaggctccctgagggccaccaatgggacagtctcccgcttcaggatcacttggaacttgccttgagatttgcaggacacaacccacaatccccagatcttttttttttttcttagagacagaggttcactctgttgctcaggctggagtgcagtggtgcaatcatggctcactgcaggcttgaactcccaggctcaagggaggcctcagcctcctgagtagctgggactacaggcacatgccaa

SEQ ID NO: 5485 - DNA, 661 bp, Homo sapiens
  misc_feature [331]..[331]: Chromosome 20, SNP identification no. = rs6031367
  misc_feature [331]..[331]: allele = c, in linkage disequilibrium with rs16988700, respectively
  misc_feature [331]..[331]: n is a, t, c or g
gtggtgcaatcatggctcactgcaggcttgaactcccaggctcaagggaggcctcagcctcctgagtagctgggactacaggcacatgccaatgcatgcccggctaatttttatttttatttttgtagagatgggggtcttgcaatgttgcccagacttgtctcaaactccagggatcaagtgatcctcctgccactcagagtgctgggatgacaggtatgagccacgtgcctggccccccagaaaccttgaatcccttgtgttctaccttatgaagtgagtcccaggtgggggtcagaagctggcatccaggtccaggaccccatggagngttacctgtgactttggatgcttctgcacacttgttgccaacttgagatgctgaattcaaaccaccacagagctgctccccgtaccaggtgagaagtgtgggaaaatggtttgaagccacgtggtttgccctgggcagtctaacgggcaagacatgaatgcacatgtgtctaggttgggcactgcaaaaaaagacgccacatctaagggcaacagggcaaacatactaacttgcatgagtggcagaggtaaagattcatgggctcccgcctgagtcctggagcagcacaggagagcccctgcccacctaaaccagtgctggcagccccag

SEQ ID NO: 5486 - DNA, 661 bp, Homo sapiens
  misc_feature [331]..[331]: Chromosome 20, SNP identification no. = rs4810407
  misc_feature [331]..[331]: allele = c, in linkage disequilibrium with rs16988700, respectively
  misc_feature [331]..[331]: n is a, t, c or g
gtttgaagccacgtggtttgccctgggcagtctaacgggcaagacatgaatgcacatgtgtctaggttgggcactgcaaaaaaagacgccacatctaagggcaacagggcaaacatactaacttgcatgagtggcagaggtaaagattcatgggctcccgcctgagtcctggagcagcacaggagagcccctgcccacctaaaccagtgctggcagccccagccatgccacaggcttgggagaacacgttcaccctgtgctgcaccctccgctgcccaaccccaaacctacattgtggcctcggtgtggcaggctgctggcgggagcacangcggcatctggggtagctgtgtgtgaagcacagagcgtggcacctgtgtgtgcagcggagttcgcctgggaggaagccacatagcatttgcctgatttcttgtatgttgcatacacgctggatgctgatttagaagggctgtttttggttggtttgtttttaaaggatacattttcacatctccatctctgtagccatgacccaaaacaaaatggaacgtttccatcaccccaatagttcccacgtgcccttgttcctcagtgatttcacccacctccctccacaccacctccccaggtaaccaccaccctaactgttattgccataaac

SEQ ID NO: 5487 - DNA, 661 bp, Homo sapiens
  misc_feature [331]..[331]: Chromosome 20, SNP identification no. = rs4812783
  misc_feature [331]..[331]: allele = a, in linkage disequilibrium with rs16988700, respectively
  misc_feature [331]..[331]: n is a, t, c or g
aaaaagacgccacatctaagggcaacagggcaaacatactaacttgcatgagtggcagaggtaaagattcatgggctcccgcctgagtcctggagcagcacaggagagcccctgcccacctaaaccagtgctggcagccccagccatgccacaggcttgggagaacacgttcaccctgtgctgcaccctccgctgcccaaccccaaacctacattgtggcctcggtgtggcaggctgctggcgggagcacacgcggcatctggggtagctgtgtgtgaagcacagagcgtggcacctgtgtgtgcagcggagttcgcctgggaggaagccncatagcatttgcctgatttcttgtatgttgcatacacgctggatgctgatttagaagggctgtttttggttggtttgtttttaaaggatacattttcacatctccatctctgtagccatgacccaaaacaaaatggaacgtttccatcaccccaatagttcccacgtgcccttgttcctcagtgatttcacccacctccctccacaccacctccccaggtaaccaccaccctaactgttattgccataaactgagtttgcctcctgttctatcgttttatataaatggactcatatatggttatcttttctgtctggcttttcttcagca

SEQ ID NO: 5488 - DNA, 661 bp, Homo sapiens
  misc_feature [331]..[331]: Chromosome 20, SNP identification no. = rs4812784
  misc_feature [331]..[331]: allele = c, in linkage disequilibrium with rs16988700, respectively
  misc_feature [331]..[331]: n is a, t, c or g
acattgtggcctcggtgtggcaggctgctggcgggagcacacgcggcatctggggtagctgtgtgtgaagcacagagcgtggcacctgtgtgtgcagcggagttcgcctgggaggaagccacatagcatttgcctgatttcttgtatgttgcatacacgctggatgctgatttagaagggctgtttttggttggtttgtttttaaaggatacattttcacatctccatctctgtagccatgacccaaaacaaaatggaacgtttccatcaccccaatagttcccacgtgcccttgttcctcagtgatttcacccacctccctccacaccanctccccaggtaaccaccaccctaactgttattgccataaactgagtttgcctcctgttctatcgttttatataaatggactcatatatggttatcttttctgtctggcttttcttcagcaccattttacgagattcattcctgcagctgtgtatagccatcccttgactttttttttttgcaaccaagtcttgctctgttgcccaggctggagtgcagtggtgcgatcctggctcactgcaacctccaccttcccagtgcaagccattctcctgcctcagcctcccgagtagctgggattacaggcttacaccatcatgcctggcaagtt

SEQ ID NO: 5489 - DNA, 661 bp, Homo sapiens
  misc_feature [331]..[331]: Chromosome 20, SNP identification no. = rs6017263
  misc_feature [331]..[331]: allele = t, in linkage disequilibrium with rs16988700, respectively
  misc_feature [331]..[331]: n is a, t, c or g
agagatggggtttcaccatgttgcccaggctgatctctaactcctaggctcaagcaatccacccgcctcagcctcccaaatcccttgtactttttattggtgtgcaatatgataaaaagaagcttggtttatgaaactgcagttcctaactggatgctactgtttaaggcccagtgccagagcccctaccccctccttctctccttccccgaactccgtctttacactttggccatgaccactgtcacccaattcacctagagtgagcgtcccattccgcctcagtcagcccccagggccacctgtgattgttcaggctgtgcaatgccancctgactccaacaatccctgggggagaggtgacggatatcctaactaccctgcttcgattatgatacatggtatgcatgtaccaaaatatcacatgtaccccataaatattgtatatcaaagatggagaattactgtaaaaaacaatgaccggaggaagagaagcctttttccagtttacaccctggccgtgtctggctggcagcagattctccacttcccacagccagagccttttaaaaactggtttggccccaatgccattgctgcagctggaacgggtacagctggctcatctaggatagaaagtgcatggccagctttgtgtgaa

SEQ ID NO: 5490 - DNA, 661 bp, Homo sapiens
  misc_feature [331]..[331]: Chromosome 20, SNP identification no. = rs16988700
  misc_feature [331]..[331]: allele = a, c
  misc_feature [331]..[331]: n is a, t, c or g
cacttgagaccaggagttcaggaccagcctggccaacatggcaaaacctcatccctactaaaaatacaaaaattagccaggtgtggtagtgcatgcctgtggtacaggtaacccataaagtcacttccaaacctcacattctataaagctgtgattcccagaggctgagagctcaccaccaccttttttgtactttcattttaaatatttaaatcttcaatccatttgcgagtgactttagtgcaaagtatgagccatggatctaagtttactttttccccaaatggttgcccagttgtctctttgctatgtattaaaggttccatttcanctttttgagtgacactcctttaattagaaaattgggtccatttctggattttaaaaatcttattccattgatccattgattttagtgtagatttttaatacaatgaagtatttttgtgggtgaagcaacctctagtttctttctgaaatattttagatgtataaacagtacagagagaatataactagcacctaggcaacctccaccaatcttaaacttcagtcagaactcaactccccacacacagttatagtcaaagttcccatgtgcttcattctgccagtttccatcctcctctgaaagtagctgcttcgagtttgtttttttaat

SEQ ID NO: 5491 - DNA, 661 bp, Homo sapiens
  misc_feature [331]..[331]: Chromosome 20, SNP identification no. = rs6031370
  misc_feature [331]..[331]: allele = t, in linkage disequilibrium with rs16988700, respectively
  misc_feature [331]..[331]: n is a, t, c or g
ttagatgtataaacagtacagagagaatataactagcacctaggcaacctccaccaatcttaaacttcagtcagaactcaactccccacacacagttatagtcaaagttcccatgtgcttcattctgccagtttccatcctcctctgaaagtagctgcttcgagtttgtttttttaatcatttccattatttaaacacaaatgtaaatatccacgatatataatattgctttatgtgttttagaattttatgtaaatttctcatactataaatatcattttccacttacaggtttttgagatatatgtaatgttggtatatgtagcttctnattctcatggctctaagaattaaatgagataatccttgtatgcaattagaagtgtctggaatgtgataaacaaggttagctgtcattatcaatgtcactaatcattatttttattatcaccattcccaccaaagggatcagaggttcacacatgacattgttgaggagcagcaaaatggagccacgatttcttttaggataacaggagccattttccctgctctgaggtatgtttggatggaaacattgggctccttgtcagctgttccctggtgctgtgcacagcttgcaggaacggctctgattttgtttaatgactctgacaagaac

SEQ ID NO: 5492 - DNA, 661 bp, Homo sapiens
  misc_feature [331]..[331]: Chromosome 20, SNP identification no. = rs6073315
  misc_feature [331]..[331]: allele = g, in linkage disequilibrium with rs16988700, respectively
  misc_feature [331]..[331]: n is a, t, c or g
ttatttaaacacaaatgtaaatatccacgatatataatattgctttatgtgttttagaattttatgtaaatttctcatactataaatatcattttccacttacaggtttttgagatatatgtaatgttggtatatgtagcttcttattctcatggctctaagaattaaatgagataatccttgtatgcaattagaagtgtctggaatgtgataaacaaggttagctgtcattatcaatgtcactaatcattatttttattatcaccattcccaccaaagggatcagaggttcacacatgacattgttgaggagcagcaaaatggagccacnatttcttttaggataacaggagccattttccctgctctgaggtatgtttggatggaaacattgggctccttgtcagctgttccctggtgctgtgcacagcttgcaggaacggctctgattttgtttaatgactctgacaagaacgccagacttggccatgtgacttgctctagccaatgagacagcagcaaacattatgcaagcagaaacttgaaaagtgcttgctcattggccttgccctctcactgctcttggtcagacccatcaccatgagaacaagcccatgctagcctgttggatgatgagagaccctgcagagaaaaggaaggt

SEQ ID NO: 5493 - DNA, 661 bp, Homo sapiens
  misc_feature [331]..[331]: Chromosome 20, SNP identification no. = rs6073318
  misc_feature [331]..[331]: allele = g, in linkage disequilibrium with rs16988700, respectively
  misc_feature [331]..[331]: n is a, t, c or g
agtctttactctgtgcttgcactggggaaaggagagatttttagtgtgtgcgtgtgtgttttagttaaagaggcagggtctctctcagttgcctaggctggtctcaaactcctgggctcaagcaattctcccatctcagcctcccaaagtgcttggattataggcgtgagccactatgcctcacctcttccttttcttataaggacaccaatcctatctgactagggtcccacacttatgacctcatttaaccttaattacttccctgaagaccctatctccaaatatatttatattgaaggttaggacttcaacatatgaattaaggtgngaggggcacaattctgtccataaccgggctcactccatttgtctcccacttctcagcgatcactgtcctttgttgatcgatgtacagtgtcttgcaaaccattgtttagtcccttcttttgttgatccagaagggaagttacctcttggctggtcttagattttcacatttatatgcataaaatagtctcaatatttttttcgtttttgttttatggtcatttgcagtattttgtatgttcctgcttttttattacactagctagtattttttttcatagaaacaattcccagttctactatttcctttctcttttctgattattctagg

SEQ ID NO: 5494 - DNA, 661 bp, Homo sapiens
  misc_feature [331]..[331]: Chromosome 20, SNP identification no. = rs6073319
  misc_feature [331]..[331]: allele = c, in linkage disequilibrium with rs16988700, respectively
  misc_feature [331]..[331]: n is a, t, c or g
atgaattaaggtgggaggggcacaattctgtccataaccgggctcactccatttgtctcccacttctcagcgatcactgtcctttgttgatcgatgtacagtgtcttgcaaaccattgtttagtcccttcttttgttgatccagaagggaagttacctcttggctggtcttagattttcacatttatatgcataaaatagtctcaatatttttttcgtttttgttttatggtcatttgcagtattttgtatgttcctgcttttttattacactagctagtattttttttcatagaaacaattcccagttctactatttcctttctcttttntgattattctaggtacttgtgtttattaattctcccttccacatcttttcattgatatttgttttgttttgtttttgagacagagtttcgctctgtcacccaggctggaatgcagcggcgcaatctcggcttactgcaacctccacctcctgggctcaagcgattctcctgcctcagcctgccaagtagctgggattacaggcatccaccaccatgcccaggtaatttttatatttttggtagagacggggtttcaccttgttggccaggctggtctcaaactcctgacctcaagtgatccacccacctcggcctcccaaagcgctggga

SEQ ID NO: 5495 - DNA, 661 bp, Homo sapiens
  misc_feature [331]..[331]: Chromosome 20, SNP identification no. = rs6073321
  misc_feature [331]..[331]: allele = c, in linkage disequilibrium with rs16988700, respectively
  misc_feature [331]..[331]: n is a, t, c or g
tgattctggtatgtttttattcataataaagcttttaatttcaataaaacatacatccagaaaatgcacacgtcttgagacagctgacaaacctattacaaagtgaatatactcatgaaaccaacacctggatcaaaaataggacattgccagcatcctaaaaattcccactgcgccacttcccaatatccctccatcccccaagcaacttctaacacaatagattacgaatgtttttgaacattatgtaagtgatatcatgacggagtctcttaggtctgtctagtttcacccagcattatgtttgtataatttgtccatgtttctgcangtagaagaaaaatctgttacaatgtttttgttatgactgaaataaatagaaaatgcaaaactgctccttaaaatctgttattacaaatgttccaagcagatttcatgatttggtgaagaggttgaatagcttacccaataatatgcaacagattaaagagaggaagtactccaaagtcacatcacaaaaatagatgcctacataagtggaaataaactaaaaatttaataattgacataacctttacacaatctgtattattttgactttcaaaaaattgctaaaatgaagtctacatttatcaagtttgctcatgcagggattatgcac

SEQ ID NO: 5496 - DNA, 661 bp, Homo sapiens
  misc_feature [331]..[331]: Chromosome 20, SNP identification no. = rs6130522
  misc_feature [331]..[331]: allele = t, in linkage disequilibrium with rs16988700, respectively
  misc_feature [331]..[331]: n is a, t, c or g
gctgaggttttttttctagctctaaaacataacatgatcctaaatatatttagacaaccaaaaatgatatcagagacatgagaaaatctggcaagatagtgatttcaagaggtggacccagctcaccctctgtattcattttctactattttactattaaatttcctggtattaaaaattaccaaaacgtagtggattaaaacaacacaaatgtcttaccttaccttattatctcatagttttgtgggccagagtccagcaagggtctcactgggctgagattaaggtgtcagcagggccgtgtgcctttcaggaagctgtaggagggtanctgcttcctggcctcttccagcctccagagacccccttcctccatcttcaaagccggcaacatagtgtgtaggtgaccctacttccatcaccacatccctttctccgaccgcagctgccactggttgtctgctcttaaggagccgtgtgattagattggatccacctggataatccaggctactcgccccaactcaaggacagatgatagcaactttagtcaattcccttttgccatgcaaggtaacatgctcacaggtgctggggactaggacgtggacattgtattaggccattcttgccttgctataaaggaacacctgagactggg

SEQ ID NO: 5497 - DNA, 661 bp, Homo sapiens
  misc_feature [331]..[331]: Chromosome 20, SNP identification no. = rs6130524
  misc_feature [331]..[331]: allele = a, in linkage disequilibrium with rs16988700, respectively
  misc_feature [331]..[331]: n is a, t, c or g
tgagtgtgagttgtccgggtcctcagtgttttgaacaaagaattggacaaaacacacaaagtgacaaacgaatgaaacaaagcaacaaagcagtgaaagcagggaatgatattttattttattcatttatttatttttgagacagagtctcactctgtcgcccaggctggagtgcagtggtgtgatcttggctcactgcaacctctgcctcctgggctcacgccattctccgaaagcgagatttattaaagtggaaagcgctccacaggtgggagtgggcccaagcaagcagctcacgggcctggttacgaagttttctgggttttaacgnctccttttgagggccctatcggctacaaaaatgagtaccaaactcatgtcttgctttatagaaaataaaggatcatctaggctttggatcctggagatttggggaacaggacaggagccggatgtcaggtccacaactacgccaaatgtcctgcttggggtcaggttcgggcccatactgaggtccaaggggagtgggcggatgggcagataggtgaaaaacactgggcgggtgccataggcaggtgaaatgtagttttattcagcagctctctcatcaacagctcttacacactcttctctcatcagtagttttctcacaccgtccgcc

SEQ ID NO: 5498 - DNA, 661 bp, Homo sapiens
  misc_feature [331]..[331]: Chromosome 20, SNP identification no. = rs6124622
  misc_feature [331]..[331]: allele = c, in linkage disequilibrium with rs16988700, respectively
  misc_feature [331]..[331]: n is a, t, c or g
tttaacgactccttttgagggccctatcggctacaaaaatgagtaccaaactcatgtcttgctttatagaaaataaaggatcatctaggctttggatcctggagatttggggaacaggacaggagccggatgtcaggtccacaactacgccaaatgtcctgcttggggtcaggttcgggcccatactgaggtccaaggggagtgggcggatgggcagataggtgaaaaacactgggcgggtgccataggcaggtgaaatgtagttttattcagcagctctctcatcaacagctcttacacactcttctctcatcagtagttttctcacacngtccgccctgttttagctgcttgagtgggctgctcccatacaccgctgtgctgccggctctcccttgccttcagggtcagcagcttaactctttctctgggcacaagctggttccgggctccccactgcccacctgcaagacggacagctttggctctctcttcctctgggcaccagcgcacccaaccacgtcaagccatgcccaagagccaagcccagccatgtccccagagccccgtgcagtgtcagcagggcagtcataccttttacagacaatagtggcgtagagccaagtatgaacttacacaaacagttatataacaagtggag

SEQ ID NO: 5499 - DNA, 661 bp, Homo sapiens
  misc_feature [331]..[331]: Chromosome 20, SNP identification no. = rs1883684
  misc_feature [331]..[331]: allele = g, in linkage disequilibrium with rs16988700, respectively
  misc_feature [331]..[331]: n is a, t, c or g
aaaagtctcactttcactattctctgggtctctaagtccattcttgagttcgaacgcatgaatttgttcctcacacatgtaccttacactggatagggctgattaaaaacaaaatcaaatacaccttctaagcttcactttcctgctagctctagagttggagttactccatcaagattgtggaagagagtgtggtaggaagaataatggcaccgctgaagatgtccattctttatctggatgaaggatttggcccatggctaattaaagctgaagtgaattggtccgcagtcatctggagacggagtggatcggcaccctacgcagatgnggggatggctagcacttggcccacagccaatccaaggcactttcctttccatctgagacatggtggaaggttgtatggagagtaacctttgattctttgttatcccagcatggcaagatggagtttttccttttggcttagcttttggaagtgggtgttaattggtcttagagtccctgcccccagacccaagtgtttcccttttgatccagccttaggaagtcagcacacattggccttaagttgcctggtccaaaccctattctcctgcctcagttcaatctgtcaatatgaaggttgaaaatacatcattaaatgagcatagctgtg

SEQ ID NO: 5500 - DNA, 661 bp, Homo sapiens
  misc_feature [331]..[331]: Chromosome 20, SNP identification no. = rs6031378
  misc_feature [331]..[331]: allele = t, in linkage disequilibrium with rs16988700, respectively
  misc_feature [331]..[331]: n is a, t, c or g
tcagacatcgggccagattttgcccaccagccatgttttgccagcctctgatattcacaaagggctgtcttctgtctgctgagtgtggcgttatttggctcaataccatggacctgaagcaggcaggactcaaatctctgcagctgggagagtttttaaatgcagctacaaagttttcctgaatattagatatatttgcaagttgccagcttgttagataagcactcacagggcgttctgctcgctgctagtttgccctgatcaacacttttatgtcgtgacctataagaaagctcagagaacctagtggccaggaatagcaaaggaaaanagttacgagaggaggtaattaccctctctaccaccaagagatagaggatggagggtggaggttaaaagggtgggccctggagtcacggtaaattactcggggtaaatcatgtaaattttctggccaccagtttcctcatctgcataatagggatgatgatagtgtctgtctaattatatcgttgataggattacatgttatcatgcatttaaaagacttagtgtctgcttgttagtttttaagtggttggttttcactacctccactattaactaccctggcataaaaaagcaaaaggaaaaagaaaggcaatttgtacaattaactcct

SEQ ID NO: 5501 - DNA, 661 bp, Homo sapiens
  misc_feature [331]..[331]: Chromosome 20, SNP identification no. = rs6031379
  misc_feature [331]..[331]: allele = c, in linkage disequilibrium with rs16988700, respectively
  misc_feature [331]..[331]: n is a, t, c or g
gctcagagaacctagtggccaggaatagcaaaggaaaatagttacgagaggaggtaattaccctctctaccaccaagagatagaggatggagggtggaggttaaaagggtgggccctggagtcacggtaaattactcggggtaaatcatgtaaattttctggccaccagtttcctcatctgcataatagggatgatgatagtgtctgtctaattatatcgttgataggattacatgttatcatgcatttaaaagacttagtgtctgcttgttagtttttaagtggttggttttcactacctccactattaactaccctggcataaaaaagnaaaaggaaaaagaaaggcaatttgtacaattaactcctaaagaaggtgaaagagttagtggaagagatgagaaaactttaataacaaataaataagaactttcaagaaaatgcaatttgggtttgatgactttctggaagtaaaatgtttgaaaaattaaaagaaatatccaatagttggactggaataaatgggaatcatggtatagtaagtgataggacatctcctcatagggatgaaagaacaggtagaccaggggaagggaggacatttaggaggcaggtgcaaaacaccccacgagaatccaggctgcagggaaatacagaatta

SEQ ID NO: 5502 - DNA, 661 bp, Homo sapiens
  misc_feature [331]..[331]: Chromosome 20, SNP identification no. = rs6031380
  misc_feature [331]..[331]: allele = t, in linkage disequilibrium with rs16988700, respectively
  misc_feature [331]..[331]: n is a, t, c or g
tgtctgtctaattatatcgttgataggattacatgttatcatgcatttaaaagacttagtgtctgcttgttagtttttaagtggttggttttcactacctccactattaactaccctggcataaaaaagcaaaaggaaaaagaaaggcaatttgtacaattaactcctaaagaaggtgaaagagttagtggaagagatgagaaaactttaataacaaataaataagaactttcaagaaaatgcaatttgggtttgatgactttctggaagtaaaatgtttgaaaaattaaaagaaatatccaatagttggactggaataaatgggaatcanggtatagtaagtgataggacatctcctcatagggatgaaagaacaggtagaccaggggaagggaggacatttaggaggcaggtgcaaaacaccccacgagaatccaggctgcagggaaatacagaattagaagagttggacaattaatcctatttgagaggataagttcaatgagctgaagactgatttttttttttttttttttgagacagggtcttgctctgttacccaggctggagtgcagtggtgcaatctcggttcactgcaacctctgcctccaggttcaagcacttctgcctcagatttccaagtagctgggtttacaggtgc

SEQ ID NO: 5503 - DNA, 661 bp, Homo sapiens
  misc_feature [331]..[331]: Chromosome 20, SNP identification no. = rs6065700
  misc_feature [331]..[331]: allele = g, in linkage disequilibrium with rs16988700, respectively
  misc_feature [331]..[331]: n is a, t, c or g
ataacttccaggctacataacaaaggaaataattatcagactgaagaaacaatccatgaattgagagaaaatatttgcaaactataaatctgaaaaggggctgatatccaaagtatataaggaattcaaaaactcaactgcaggaaaacaaataacccaattaaaaatgagcaaaggttctgaacaggcatttcactaaagattagatacaattgcccaacagatacatgacaaaatactcaacatctctaatcattaggaaaatgcacattaaaaccataatgagatttcacctcacacctgttggaatggctattaccaaacagatgantgacaagtgttggtgaagatgtgaagagatgggaacccttgtgtactcttggtgggaatgtaaataagtacagccttttggaaaacaccttgaagattcctcaaaaaactgaaagaacacctttgtcctctaacaaaggtgtcattgtgaggtccatcctctgtagtcaaggctctctgggtctgtgaatttatttaggtctgggaactaggtatgaagccgtggctttcttttgcagtgactcaagttagacttttgcctatcaaacctacagtttgtccagtaatactttagcagatggtccagctatttcatctccccaaggatacc

SEQ ID NO: 5504 - DNA, 661 bp, Homo sapiens
  misc_feature [331]..[331]: Chromosome 20, SNP identification no. = rs6073327
  misc_feature [331]..[331]: allele = t, in linkage disequilibrium with rs16988700, respectively
  misc_feature [331]..[331]: n is a, t, c or g
cacctcacacctgttggaatggctattaccaaacagatgagtgacaagtgttggtgaagatgtgaagagatgggaacccttgtgtactcttggtgggaatgtaaataagtacagccttttggaaaacaccttgaagattcctcaaaaaactgaaagaacacctttgtcctctaacaaaggtgtcattgtgaggtccatcctctgtagtcaaggctctctgggtctgtgaatttatttaggtctgggaactaggtatgaagccgtggctttcttttgcagtgactcaagttagacttttgcctatcaaacctacagtttgtccagtaatacnttagcagatggtccagctatttcatctccccaaggataccaggattgattagctcctggtaaaaatccctgcatgtcaaaccttctgattgctattggttcacgttgcccatacagaacttgcactcaccttgtctgtgaaagttaagtactgccacttaccttctaccaccttgagatcttttcactcttattgaaatcaggaaaaaatagtttttacaacatagtggtgccaattatgagccattaatgagctgtgtaacaacctgggaatccaggtgctatggtttgaatgctgctgtccccctcaaactcatatgttgaagcctca

SEQ ID NO: 5505 - DNA, 661 bp, Homo sapiens
  misc_feature [331]..[331]: Chromosome 20, SNP identification no. = rs6073328
  misc_feature [331]..[331]: allele = c, in linkage disequilibrium with rs16988700, respectively
  misc_feature [331]..[331]: n is a, t, c or g
gggtctgtgaatttatttaggtctgggaactaggtatgaagccgtggctttcttttgcagtgactcaagttagacttttgcctatcaaacctacagtttgtccagtaatactttagcagatggtccagctatttcatctccccaaggataccaggattgattagctcctggtaaaaatccctgcatgtcaaaccttctgattgctattggttcacgttgcccatacagaacttgcactcaccttgtctgtgaaagttaagtactgccacttaccttctaccaccttgagatcttttcactcttattgaaatcaggaaaaaatagtttttanaacatagtggtgccaattatgagccattaatgagctgtgtaacaacctgggaatccaggtgctatggtttgaatgctgctgtccccctcaaactcatatgttgaagcctcattgccaatgtgacaatattaggaggtggggcttttgggagtgcttaggtcatgagggtttcaccctcattaatgggattagtgcccttatgaaaggggccacagagagctgccttgccccttccaccatgtgaggacacagagcgaaggtgccatctgagagccagaaagcagtccctccccagatatcacatctgttggtgccttgatcttggacttc

SEQ ID NO: 5506 - DNA, 661 bp, Homo sapiens
  misc_feature [331]..[331]: Chromosome 20, SNP identification no. = rs2038165
  misc_feature [331]..[331]: allele = a, in linkage disequilibrium with rs16988700, respectively
  misc_feature [331]..[331]: n is a, t, c or g
aataattgtatttaacgggtctgagacagagagctgtgtgccaggaatcatcctggaaggataggtaggggtaaaatcagagtcctctccattccctctcttccaaactcacaatgcttttgtgtattttcacagcctcctgcacatccctctgtcctggcatgtttaatgccaggccatcaggtaagacattccaggtcttctttcctggagtataaggactatgcctcttgtatctctttaatccaagtgcccatgaaaggttctgtaagtcattgacttccttaaatattttaaaaaataaatggaggaacaaagagggagaagttanaccaccaactggggaatgtccaggtgttcatgtctaagaaaagagtaatcactagcttttctcactgtctctacctggatatagggacccaatccaagtagatactaagaaagataattctactggctgatattagataggattggggggaagaaaagatgaggaaagaagagaacatggggaaaaaactgaacttgtgaaatgaaataatgagtggagttggagggagggtccttggtgagtatcagtgcagcccaaaaggatcaggtagtctgaagggataatgtcatcatggctggagactggacactcataggaaccccctcctct

SEQ ID NO: 5507 - DNA, 661 bp, Homo sapiens
  misc_feature [331]..[331]: Chromosome 20, SNP identification no. = rs6073329
  misc_feature [331]..[331]: allele = c, in linkage disequilibrium with rs16988700, respectively
  misc_feature [331]..[331]: n is a, t, c or g
ggacccaatccaagtagatactaagaaagataattctactggctgatattagataggattggggggaagaaaagatgaggaaagaagagaacatggggaaaaaactgaacttgtgaaatgaaataatgagtggagttggagggagggtccttggtgagtatcagtgcagcccaaaaggatcaggtagtctgaagggataatgtcatcatggctggagactggacactcataggaaccccctcctctgactgtatttttctctgtgacttctcctgcggtggtagattgggattttattcccaattcttcactccgtataaaagaataatanggccaggtgtggtgactcatgcctgtaatcgcagcactttgggagactgaggtgggagaacagtttgagcccaggaatttgaggctgcaaagagctatgatgtaacactgcactccagcttgggcaacagagtaagaccctgtctcaaagaaaagaaatcatatgtccacttttttgtggtaagtacctgcctctagatttggaagagtttacttcccccacaccactgttgttgggctcaggcatgggacttgatttggccaataggatctaagcagacatgataggagcagaggctttcattcctgcacttctgccatccaccgtaag

SEQ ID NO: 5508 - DNA, 661 bp, Homo sapiens
  misc_feature [331]..[331]: Chromosome 20, SNP identification no. = rs6065701
  misc_feature [331]..[331]: allele = a, in linkage disequilibrium with rs16988700, respectively
  misc_feature [331]..[331]: n is a, t, c or g
tgactgtatttttctctgtgacttctcctgcggtggtagattgggattttattcccaattcttcactccgtataaaagaataatacggccaggtgtggtgactcatgcctgtaatcgcagcactttgggagactgaggtgggagaacagtttgagcccaggaatttgaggctgcaaagagctatgatgtaacactgcactccagcttgggcaacagagtaagaccctgtctcaaagaaaagaaatcatatgtccacttttttgtggtaagtacctgcctctagatttggaagagtttacttcccccacaccactgttgttgggctcaggcntgggacttgatttggccaataggatctaagcagacatgataggagcagaggctttcattcctgcacttctgccatccaccgtaagataaacatgctccgttggcactggtcccaacatgagaaacaactggaggaaacctgaacctttcccttagcctgaagcagagccaacacagtcaacccacagatctatgagcaagaaaaaaaatggttgttatcgtgagggttgcttgtcatgcagtattatcacagcaatattgcactactacacttgctttcttttttgagaatttcattccactctcccttttctgcttaactttcatgtat

SEQ ID NO: 5509 - DNA, 661 bp, Homo sapiens
  misc_feature [331]..[331]: Chromosome 20, SNP identification no. = rs6065702
  misc_feature [331]..[331]: allele = t, in linkage disequilibrium with rs16988700, respectively
  misc_feature [331]..[331]: n is a, t, c or g
agcccaggaatttgaggctgcaaagagctatgatgtaacactgcactccagcttgggcaacagagtaagaccctgtctcaaagaaaagaaatcatatgtccacttttttgtggtaagtacctgcctctagatttggaagagtttacttcccccacaccactgttgttgggctcaggcatgggacttgatttggccaataggatctaagcagacatgataggagcagaggctttcattcctgcacttctgccatccaccgtaagataaacatgctccgttggcactggtcccaacatgagaaacaactggaggaaacctgaacctttccctnagcctgaagcagagccaacacagtcaacccacagatctatgagcaagaaaaaaaatggttgttatcgtgagggttgcttgtcatgcagtattatcacagcaatattgcactactacacttgctttcttttttgagaatttcattccactctcccttttctgcttaactttcatgtatctcaaatgatgttataatttctttttatatttctgatgaggctcagggatctccttttcccctcatccacatacctaaaaaccaccttgtgcacataaccaatcccacccatttgtaatgggctctgtacaaaggccacattaattgcacccc

SEQ ID NO: 5510 - DNA, 661 bp, Homo sapiens
  misc_feature [331]..[331]: Chromosome 20, SNP identification no. = rs4378864
  misc_feature [331]..[331]: allele = c, in linkage disequilibrium with rs16988700, respectively
  misc_feature [331]..[331]: n is a, t, c or g
gcctgcatcaagttagacttcttcctctgccctgttctgcattttcctccttcctttcacaggttttgatccctaataaacatcttgcagcttaggtgactctcagtgtctgctcctgcagaatccaatcagtgatggcatcttccacatacagcaaagaagtgatatagccaggattagaaactaggtctgtccaattccaaagccccaacccatccccactccccaaccatactgcctcttatggccaccatatccatttcctcaataagcactcactgaatgtctactctgccccgagacctaagtgggacaatggggatggtactanaggctgtactgtcttgtctgtttaccaaaacccacatccttctcttctccctgaggacacatgtagtccgtatttcccagcctcccttgaagctagttgaggccaaacaactgagctctggctagtggaatatgagcagaagtgatgtgtgctgttttcctggtgaaagtttttaggaagcaaattccatcctccatactctctttccttttcctttggcagatgcagagaccaaaaaagccctaggatatgtagaaccacagatggaaaaaacctgggtccctgaatcattatgatgagggacagctattctatgacaaacttatatgg

SEQ ID NO: 5511 - DNA, 661 bp, Homo sapiens
  misc_feature [331]..[331]: Chromosome 20, SNP identification no. = rs6065703
  misc_feature [331]..[331]: allele = t, in linkage disequilibrium with rs16988700, respectively
  misc_feature [331]..[331]: n is a, t, c or g
atgccagaaaaatcaaccacagggttaaaagattggggctttgggctatgtgatgtcagcctgacctttgggtgtggggaggggtatggaggttaagttcaaccatgtgggaaatgattcaatcaatcacctctacataatgaagtcccaataaaaactctggacactgaagcactggttagcttccctggttggccatactttgtcatactgttacttatcaatgctggcaaggtaacagataccgaggacacgggtgtttagcatttggaaccctcccagattccttcctatgtccctttcccttggctggttctgattcgcattcttngcttgtaatcaatgtgacttgagtagaatagctttcagtgagttctgtgagtctttctagtgaattattgagtatgaggataatcataggaacccccttgtttgtagccagtcagtatgaactgatggtggccctggagatccccaaacttgtatctggggtctgaagggagagggggagattgttccctcagactttgctgactttacagcctcaagattgctgactttacagcctcaagatgtaaatagctttaaaaggtcactaagaagtgactgtataccattgcactccagcctgggtgacagaatgagactctgtctcaaaaaa

SEQ ID NO: 5512 - DNA, 661 bp, Homo sapiens
  misc_feature [331]..[331]: Chromosome 20, SNP identification no. = rs6031388
  misc_feature [331]..[331]: allele = g, in linkage disequilibrium with rs16988700, respectively
  misc_feature [331]..[331]: n is a, t, c or g
cagtatgaactgatggtggccctggagatccccaaacttgtatctggggtctgaagggagagggggagattgttccctcagactttgctgactttacagcctcaagattgctgactttacagcctcaagatgtaaatagctttaaaaggtcactaagaagtgactgtataccattgcactccagcctgggtgacagaatgagactctgtctcaaaaaaaaaaaaaaagaaaagaggaagaagaagtgactgtaatgtaggcacctggtcaagacagcctggagtgaatggtgaatgttctgacacatgaggtgccctggcatctgttgccntacatgagggtctcacctgcagttggtctgtggacaaaatatgactccccgctcagtccaggctctgtcactgacttgctgtgtgatccttacaaatcacgacactctctccagacctgtttccccatatgaaaaacagggggccagatgagctgatatcttagagtgcctccatctctgacaacctaaggagttatttcctcaagcttcttcagagaagaaggaaacttccttccctgaactccttcaggaattctgaatcatcacatccactaatatccaatagacaaatgtcccctgccacatccctgttgactagcatctcccctc

SEQ ID NO: 5513 - DNA, 661 bp, Homo sapiens
  misc_feature [331]..[331]: Chromosome 20, SNP identification no. = rs6073330
  misc_feature [331]..[331]: allele = c, in linkage disequilibrium with rs16988700, respectively
  misc_feature [331]..[331]: n is a, t, c or g
aagattgctgactttacagcctcaagatgtaaatagctttaaaaggtcactaagaagtgactgtataccattgcactccagcctgggtgacagaatgagactctgtctcaaaaaaaaaaaaaaagaaaagaggaagaagaagtgactgtaatgtaggcacctggtcaagacagcctggagtgaatggtgaatgttctgacacatgaggtgccctggcatctgttgccgtacatgagggtctcacctgcagttggtctgtggacaaaatatgactccccgctcagtccaggctctgtcactgacttgctgtgtgatccttacaaatcacganactctctccagacctgtttccccatatgaaaaacagggggccagatgagctgatatcttagagtgcctccatctctgacaacctaaggagttatttcctcaagcttcttcagagaagaaggaaacttccttccctgaactccttcaggaattctgaatcatcacatccactaatatccaatagacaaatgtcccctgccacatccctgttgactagcatctcccctcagctggctcatctgcagtgatgggaagctcactctttcatggtgggagcagtgtggttctgtaaaagagcacagctctgggtttcagtcccagctctgtcctt

SEQ ID NO: 5514 - DNA, 661 bp, Homo sapiens
  misc_feature [331]..[331]: Chromosome 20, SNP identification no. = rs3746568
  misc_feature [331]..[331]: allele = t, in linkage disequilibrium with rs16988700, respectively
  misc_feature [331]..[331]: n is a, t, c or g
ttttgcacaaaacaagaacctaagagctattttaatttcagcatacatgcaagttttatgttttacagtttaggtattatttgtattctgagtcacttatttgggggagagcatcttcatatcagtttttcaggcatggcacctccaaaggtcatcatctgggcctgcatctctcccagaacagccaggtcttctgtgggtccatcagattatgaaacttcccttcttgcccgaatcccaaatctgactcccacggttcctaggtcccctccctttcactgccctggaagagtcctgcagagacctcaaggcagtgggccagcattgcttntaagttcatgcatggtacaaaccaccttaaatgcattccgggcatggcaggagacccatcagacttcctagagctgcctgtggtcaagattagaagaggaggcatcggcctggctgtgtcctacccttgagccaacagggggtgctgtctccgactaaccctacctggctctgagtctccaaacctggggctcaggaagccgcctcctttgcacaccatccaaagtgagttcaatacagccacccctgcccccaactcatccaacacacacacatacacacacacacacagacacaccccatctgcagaccggccaactgggctggctgc

SEQ ID NO: 5515 - DNA, 661 bp, Homo sapiens
  JPH2
  misc_feature [331]..[331]: Chromosome 20, SNP identification no. = rs6031395
  misc_feature [331]..[331]: allele = c, in linkage disequilibrium with rs16988700, respectively
  misc_feature [331]..[331]: n is a, t, c or g
ggaggtaggctctgtaattatccccattttatagatgagaaaactgaggctcagagaagcgaagaaagtggctgggctagcattggaggctggggggactccacctcaaagggcaggctcttgattctattgtcatctactcatagaagtttctggaagtttgctttagaaactccactgtagaagctctatggtctttcagcccccactcaaactgaagcccttcagctgcccctcaaggatcgtgagaacaaggacacagatgggaaggacccacgtcccccagcctcttcccacccaccctccttgagccagcccctcatcctggacncacaagcacattgcagcccagccagagcccgtgagcagatgcgggtttattattgcacagactgcagcatcctgaaccccaaacccaaccccaaacaccagcccccaaacttggcctgggagctttggcaggcacaggcttgtccccagcaccagccaaaaaaaaacaacagaaaaaaaacaggacaagaatctccgagacggagcccgtcagcacagagcagtggccccgccccattcccctcatgctccaggagtcttgagaagctcagatgcagatgcagagctgtgggccatggccagctgaggatggaagaatctgcaggttctt

SEQ ID NO: 5516 - DNA, 661 bp, Homo sapiens
  JPH2
  misc_feature [331]..[331]: Chromosome 20, SNP identification no. = rs1055716
  misc_feature [331]..[331]: allele = c, in linkage disequilibrium with rs16988700, respectively
  misc_feature [331]..[331]: n is a, t, c or g
actgcagcatcctgaaccccaaacccaaccccaaacaccagcccccaaacttggcctgggagctttggcaggcacaggcttgtccccagcaccagccaaaaaaaaacaacagaaaaaaaacaggacaagaatctccgagacggagcccgtcagcacagagcagtggccccgccccattcccctcatgctccaggagtcttgagaagctcagatgcagatgcagagctgtgggccatggccagctgaggatggaagaatctgcaggttcttctccatgaaaatacagtcctggattccagccaagccacaaggtcccagcagggcttgaaanggcaagtgtgaagctaagggagaaggttcccaagcattgaagggaaatgggaaagctgaccctatcagaagcaaactcctaggtcccagagctgcctggggaggccctgccacaaagccaaagcctccaaggtccacagaaatgaagggaggacagcagcagttccctctggctcagcttggatgccacgtccttccccaggcttggaggggcctggaagccctttctctccattctcctggaggcaggaaaccatagcctttggccctcaccccacccacaggaagcacaagggcccagagacctagtgtggtacaaaacatctttaag

SEQ ID NO: 5517 - DNA, 661 bp, Homo sapiens
  JPH2
  misc_feature [331]..[331]: Chromosome 20, SNP identification no. = rs6065705
  misc_feature [331]..[331]: allele = a, in linkage disequilibrium with rs16988700, respectively
  misc_feature [331]..[331]: n is a, t, c or g
cccagagctgcctggggaggccctgccacaaagccaaagcctccaaggtccacagaaatgaagggaggacagcagcagttccctctggctcagcttggatgccacgtccttccccaggcttggaggggcctggaagccctttctctccattctcctggaggcaggaaaccatagcctttggccctcaccccacccacaggaagcacaagggcccagagacctagtgtggtacaaaacatctttaagtgaggtacatccaagtagccatcttctaccaagtaagccaaaggggcttataactgcacccaggctgtacccagttggagccccngacttgcccctctcttgccgggaaatgcttcttgacaagcagcttgtcttcaacacctgccttagtgtctgccccagggacatctccctgggcttccatgggcttctgtgctcccctgagctttcggtgggccctgatgggggaggagacaagccatttcacagggcatcacaggagatttctcgccggccccaggcctcctgcaggtgaccctctagcatcccaagcacacgggaaaccccaaatgcaatcccagtctcagacacactccaaaacaggccatcatcactgcaccttaacccctcttcccaccctgccccctggccacct

SEQ ID NO: 5518 - DNA, 661 bp, Homo sapiens
  misc_feature [331]..[331]: Chromosome 20, SNP identification no. = rs2425635
  misc_feature [331]..[331]: allele = g, in linkage disequilibrium with rs2425639, respectively
  misc_feature [331]..[331]: n is a, t, c or g
attagcagctgggtaagttggtcttaatcaggctaaggacagggagggaggaaggaggcccagggatggggcccagttatcagttaaccacatgaatgttgcttccttccaaacccactggccttcagccccaagctccctcatcttcctctcggaaatactcctgtgacaagccagtggccacccatcatcgggtgaacaagccagtggccacccatcatcgggtgaacaaacacaatgccactcatggtctgtgatgaagtagaaagtgctcgttgttaagacaaagctcacccaccaccgctgcgtggacttgagcaagtccctttcnccctctgaggctccgtgaggggccccaggtctgggccccaagtctatggttcagtctgtggccagctgccactcccctgacggcctcagtgtttccgtccactaaatgggtgggttagccaaggcatcttttccagtcttgaagctttgtgggtgcctgatttgattaagccacagtggcctttgccgagtgcagagggtggtatgagtggcattttaggagctcaaggaagagaaagggaggggacctacctggtatctgccgttggtatcagcaagtgtcagatcccagctccaggaagagggctgtcctctcagatgggaggcaggg

SEQ ID NO: 5519 - DNA, 661 bp, Homo sapiens
  misc_feature [331]..[331]: Chromosome 20, SNP identification no. = rs2425637
  misc_feature [331]..[331]: allele = t, in linkage disequilibrium with rs2425639, respectively
  misc_feature [331]..[331]: n is a, t, c or g
ggccacccatcatcgggtgaacaaacacaatgccactcatggtctgtgatgaagtagaaagtgctcgttgttaagacaaagctcacccaccaccgctgcgtggacttgagcaagtccctttcaccctctgaggctccgtgaggggccccaggtctgggccccaagtctatggttcagtctgtggccagctgccactcccctgacggcctcagtgtttccgtccactaaatgggtgggttagccaaggcatcttttccagtcttgaagctttgtgggtgcctgatttgattaagccacagtggcctttgccgagtgcagagggtggtatgantggcattttaggagctcaaggaagagaaagggaggggacctacctggtatctgccgttggtatcagcaagtgtcagatcccagctccaggaagagggctgtcctctcagatgggaggcaggggtccagtggggtggctgtggctgcagggacagcctagcagagcctcttggtggcccagaccccctgtccctggaccttggaagccgctaaaggaagcagcaagaccaggccagctggtggctgcctggactggagtttggtcagtggttggggacctatattgtgagatagttaggactttgtccacaaactggaatttgaaatttca

SEQ ID NO: 5520 - DNA, 661 bp, Homo sapiens
  misc_feature [331]..[331]: Chromosome 20, SNP identification no. = rs717247
  misc_feature [331]..[331]: allele = t, in linkage disequilibrium with rs2425639, respectively
  misc_feature [331]..[331]: n is a, t, c or g
tgtacccaacacaaagaaatgataaatgtttgaggtgatggatatcctaaatactttgcatggtatgcatgtatcaaaatacatgtgctccatatatatgtacaattattatgtatcaattataaaaagtttcattcccttcctccaagggattttttttttaactagtggaaaaaagaaagcaacttcataacgccctccagtgaggaagaacattatcctgacaatgcttaggtgctttcatatgagcacataataaatacaggaagtcacagagcaaatgtcacagtattggtttggtttttatttctatgcttataaaaaatattangcttctttctgtggactgagtgggtgttagcctgtgggtattggtctctggtgcctgtataccagtgactatttatattccaagcccagggccagctgtctgcacaaggcaagtttttatttcgaagccttggttactccttctgtacaaggggtctaacttgtcgtttgtcgtgaagattaaatgagagagtagataagcttcttagcctctcttcccctgacctctctttaggggaataaaccacagaccttgtgggtcagatagatctaggttaaaatccaggcagtgccaatgtaccaaactctgtgacctcaacttctacttttc

SEQ ID NO: 5521 - DNA, 661 bp, Homo sapiens
  misc_feature [331]..[331]: Chromosome 20, SNP identification no. = rs2868094
  misc_feature [331]..[331]: allele = t, in linkage disequilibrium with rs2425639, respectively
  misc_feature [331]..[331]: n is a, t, c or g
gacagagtcttgctctgtcacccaggtgcagtggaacaatctcggctcactgcagcttccacctcccaggttcaagtgattctcctgcctcagcctcccaagtagcctggactgcaggggcatgccaccatgcctagctaatttttgatttttgtatttttagtagagacagggtttctccatgttggccaggctggtcttgaactcctgacctcaggtgatctgcctgcctcggcctcccaagatgctaggattacaggtgtgagcccctgtgcctggcctgaaactttcaaggtctcaagacactgtacatttaaagtaccccaatgtnttccttttccacctcccgttctttctccttatctaacatgaagaacattgtattaaatctgatttttaaggagtttttgtctgttatgtgttaagggtttgtttggtaccccaatgaaaacattctgcattgcagaccaaagtgtgcttatttcaggggcatgggatcattgcgttcttagccattgtcacaaaatacatggagtcatatttaaaatgtaaagttgtaacatacatatgtttaaaatggaaatacaaagcaaaaagatggatgtacaatgtcatgtgtattcagttctctgtacttagtaaatgtaacaaactttctgtc

SEQ ID NO: 5522 - DNA, 661 bp, Homo sapiens
  misc_feature [331]..[331]: Chromosome 20, SNP identification no. = rs2425639
  misc_feature [331]..[331]: allele = a, g
  misc_feature [331]..[331]: n is a, t, c or g
gctaagggtggaatgaatcatgtatgtaatagattatgcaatttacagtgatgagtggatagatttacttatggggtaggttataatgtggtgggatgtgaatctagaatgtgcctcctaggcagtcatgcagattgtgcatttggtaagtcaggtatgtcatgattcatgtatctaatagctcttcatttgcagtgtccacctagtagctcttggatataacgggtcatggctgtggcatggtgtggttgatcttggttgatcgtagaccttatttaattgaatctaagatgtcatctatggaaaaatgcattgttatttttgttgccantgaaattctgacatgacattgatcacattccccgttaagcaatgtggaactgtgcctcagagtggaagaggccatgtattcctggattgtgtggggagtagctgtgcctgtggcctgccataggtgccaggcaggtggcagaggcctgggctcagcccttggaggctcctcccggagctgccctccacatctcttctgtgtttaccccttggtcggatcttctgtttcttcccacctctgcactgcccccaaggccggtggagccaggtcagatactcctgaggtaggcatgggaggaacccgccggtatttggtctctttcagcccctt

SEQ ID NO: 5523 - DNA, 661 bp, Homo sapiens
  TAF4
  misc_feature [331]..[331]: Chromosome 20, SNP identification no. = rs6142696
  misc_feature [331]..[331]: allele = g, in linkage disequilibrium with rs6142925, respectively
  misc_feature [331]..[331]: n is a, t, c or g
ggtggggcggggtgggacaggggtctgtgggaagccactgctgaaaggctaagccaccccaagtcccagggcctgagaggtgtccaggaaggtcagtgcagaccacagggcagggaccactgagcacaagacgggaaggggttgtcaaggcaacacagcatgtcctgagaggagccctttggccactgggtggtgaggcagaaaagaaggaaagggggaagttctgggtcctgcaggaaagggccgggagaactggaggacaacttccgtcctgcacaccagcaaggacccgctcaagacctggacttccccatgtggccagcagacggcnccaggaaaccacagatgtggcaaataccccaaggccaccagggcaaagggacagaggcggtaaagccacccagagccacgggaaagtcagagaagagtcaaaaaatgggggctccacacacatcagagaaaaacctaccctggaacaacaagaaaattaacaacactctcaatacaggaaaatctgcttaagtgtgcacttaaggatatgaaaatcatcacctcaaatcagaacctcaaaaactaggagacaaatttttataaaaaccataaaattacaaatgcaacaccaaaaggaaataagagttgactggacttaagaaagtaatgg

SEQ ID NO: 5524 - DNA, 661 bp, Homo sapiens
  TAF4
  misc_feature [331]..[331]: Chromosome 20, SNP identification no. = rs2281733
  misc_feature [331]..[331]: allele = a, in linkage disequilibrium with rs6142925, respectively
  misc_feature [331]..[331]: n is a, t, c or g
aaactcagacaaaacacatgaccaggtgtcaggtgtgctcacctgaagctcccatgccccagcagcgcagctgtttaataagaactcagtcattaaacaccaacgtacctatttctaatattcttctctgcaaaggcgcttggaggaggaaggtttcatctttacaggaccgcgttagcgtgcccaccaattcagagttcgtggctaatattcttgcactttcttctgacaagtttactccagccatcgatgcaacatcattaatgtcatcatcgtcccttgaggaaagaagggaagatcactttaactgtacaaggaattcatcgggagntgggctggggtggtaagggcaggaaaccccacgtggaaggcagggccgtgaggaggccaggcctctgtcctccccgcacctgcacctgctgcatctgccacagcagagagggtgcctcgctgctttcctggaaagctcgattgttctgcggaaggagagctgtgagttggcgccgggttaacatctacacacagatgcgcaggggactcaagtccagagaaagcaaagccgggagcagcgcggggacttgtgggggtctgatctatgcaaagctttttaaagccagaggcagcattaaattctttttaaaggctcagaagttggaagaag

SEQ ID NO: 5525 - DNA, 661 bp, Homo sapiens
  TAF4
  misc_feature [331]..[331]: Chromosome 20, SNP identification no. = rs2144677
  misc_feature [331]..[331]: allele = a, in linkage disequilibrium with rs6142925, respectively
  misc_feature [331]..[331]: n is a, t, c or g
tgccagaagaattacattttgagcacattccctttcatgggcagagggattcaccaaacgtagaggggcagttttaaaaaaatttcagaggtgttttcttcctctaaagacagcttaaacaacaaaatggtgcgggctccctcatcatgagctggtatgtgttgtgatggtgtacacatcagaaccagctgggtgaggagtagccattagggggctggctcttgtgctctgttcaagttgcatttgtttttgtcttgataatagcgaggagaacagggtgaaatggcatggagggagggtgtcccttataaaggccagggaagggctgagngcctgtgtaaagagagggcttccttgcctgccttttgactccagagggaaagagatgtgccgtgcctcttgctttagtgtaaggacagaacttccctgttcactagtcagtggagctactttacccaaaaaggtgggttctgtttaagcaggcacagcctgtgggcaatcattttcttgccaagttttgacctctggtgcttagtcacacacaagcagcatgggtgtttttagaattaggtgctgtgtttggcagcaggatcacctctgcattctgcttccctgggctcctcctgaccacgtgtgagtctgcagagcacagccagtggga

SEQ ID NO: 5526 - DNA, 661 bp, Homo sapiens
  TAF4
  misc_feature [331]..[331]: Chromosome 20, SNP identification no. = rs2296085
  misc_feature [331]..[331]: allele = a, in linkage disequilibrium with rs6142925, respectively
  misc_feature [331]..[331]: n is a, t, c or g
gacggctctgccactggagcgcgaatgtgcctcagctggtctgctccatggggagggggcttctggtggctcagggtgcagaatgcctgttccagccgggactgcggacacctgggaattttataagaggtcacacaggagtggggagagggccagaagggagttgctggagaccctgaccagagtgcagcatggttggggcagccagaggagaagagagccacagacaagggacgcaggcaccagaaaacggcaaagcccgggagacctccaggcgccggccccagaacacccagccccaggaaggagtctccttagctaggccacacangccttcgacacgtgtgcacccctccccttcgcctgcagccttccagaggagctctccctgctggcacaggcctcccgggcacaggtcacagcagcaacaggtgtctgtcctatgcaacaggctttaggggaaagggaatgtaaagtcaaggtttctcaccagtaaattctgcacgagctctttcacattagctgctgtctctgtagactgcttgccagatgaagccagttttattaacgtagataggaaatttttacatttcttcacgttttccatagtttcctggattaaagtaaaaagatataagtgaaaaatcttaaaaggcagatt

SEQ ID NO: 5527 - DNA, 661 bp, Homo sapiens
  TAF4
  misc_feature [331]..[331]: Chromosome 20, SNP identification no. = rs2296086
  misc_feature [331]..[331]: allele = g, in linkage disequilibrium with rs6142925, respectively
  misc_feature [331]..[331]: n is a, t, c or g
aagaggtcacacaggagtggggagagggccagaagggagttgctggagaccctgaccagagtgcagcatggttggggcagccagaggagaagagagccacagacaagggacgcaggcaccagaaaacggcaaagcccgggagacctccaggcgccggccccagaacacccagccccaggaaggagtctccttagctaggccacacacgccttcgacacgtgtgcacccctccccttcgcctgcagccttccagaggagctctccctgctggcacaggcctcccgggcacaggtcacagcagcaacaggtgtctgtcctatgcaacaggctntaggggaaagggaatgtaaagtcaaggtttctcaccagtaaattctgcacgagctctttcacattagctgctgtctctgtagactgcttgccagatgaagccagttttattaacgtagataggaaatttttacatttcttcacgttttccatagtttcctggattaaagtaaaaagatataagtgaaaaatcttaaaaggcagatttttgtcacagcctttggttactaaaatatgcatatgtacaaaagatacatatatttcttctctaaacttctttcaagaaaacgcaccacctcttggaaccctgggccatggggcaggccagcca

SEQ ID NO: 5528 - DNA, 661 bp, Homo sapiens
  TAF4
  misc_feature [331]..[331]: Chromosome 20, SNP identification no. = rs2296088
  misc_feature [331]..[331]: allele = t, in linkage disequilibrium with rs6142925, respectively
  misc_feature [331]..[331]: n is a, t, c or g
caggtcacagcagcaacaggtgtctgtcctatgcaacaggctttaggggaaagggaatgtaaagtcaaggtttctcaccagtaaattctgcacgagctctttcacattagctgctgtctctgtagactgcttgccagatgaagccagttttattaacgtagataggaaatttttacatttcttcacgttttccatagtttcctggattaaagtaaaaagatataagtgaaaaatcttaaaaggcagatttttgtcacagcctttggttactaaaatatgcatatgtacaaaagatacatatatttcttctctaaacttctttcaagaaaangcaccacctcttggaaccctgggccatggggcaggccagccacatcagtcacatggccaccgaagtcagcatctccctcagccccgcaaggccacatctaggaatgcagctatgcaaataattaaaaaagtgaaaagagactctgcgaagatgcctgctacaatgttgctgaccataaggacaacctatgccaatccaaacggacacagaaggaaccaaataggatgcggtcactaaagcaacgaaaagtacgcagcaaagaaacaccaaaaaggcgtcaagtggggcccactgtttaaagatgtctatcgatacaggccgacactgtgt

SEQ ID NO: 5529 - DNA, 661 bp, Homo sapiens
  TAF4
  misc_feature [331]..[331]: Chromosome 20, SNP identification no. = rs2281736
  misc_feature [331]..[331]: allele = t, in linkage disequilibrium with rs6142925, respectively
  misc_feature [331]..[331]: n is a, t, c or g
gagaccagcctcacgcccagcaaaagaaaacaagcctccctgcggtggccaggacgcccaggaagccaaggaccccggccacctgccagcccgctggacacgggagtgctgctgggaggcctgccctgtgccctgacgatcgcagtcctgagcgggtgaggaaggcatgatttgcacctgcatcaaaaacggacgttcacaaagccaggcactgcagagaccccagtcctcagaagtccatggaaaaagtcacatagagaccagagtaaataatcctaacaggcaacccagatccccatctctcagaaatcaaaacaacaaacagaagaanggctcctgaaagctccatcctcccaggtgcagaggctggctacagggcggtcagggctccacagccgcagcctcccataggggagggtccccagctccctgcaatcacccaaacccacctttctttactccccaaaagtgagtgtcaacaagaagcctcccacagaggggagttttcagagcagattcgagcaatggaggatgggtcatcagtgtcaaactgtcagaaaggaggggctgctttgctaagcaaatgaacagccagacgccaaaaggtagctcagacaactcagtggcctgtactcgattcctaacatttccattctacatg

SEQ ID NO: 5530 - DNA, 661 bp, Homo sapiens
  TAF4
  misc_feature [331]..[331]: Chromosome 20, SNP identification no. = rs3787428
  misc_feature [331]..[331]: allele = c, in linkage disequilibrium with rs6142925, respectively
  misc_feature [331]..[331]: n is a, t, c or g
tctgccactaagtataatgcaaaaacttaaccataagctccaactaccttctcaaaaaagtcactgtaaccaaaaatccagacgcaccaatcagagcacaggactgagcaagctccttcagggaaaacaccaagggcggggcctgcaccaaaggccagcacacatctccctggtactgaaccgcccttccacccactttcacccactgcagctgcagccagccaggacatgacccagtgagggtagaagagccggggttgcggggggagctgcccctggagtccacaccccctggggctcagcctccatttcaccactgagcaatgggaanagggcctgtggcactgaggcaaggactctggatctctctgcagagcgtccaggcccactgcctggctcatggcaggtgcttcaccagcagcgaccaacaccatagagacctacgcatccacggatgctcacagacaccaggtgaccaagaaaaacccctgaaccatttttctcccagctgcttcctgctgactgcccagagaaagctgcttccctcaccaggtgcgtctgaccggccagccccttcccctccacacacctccgccaccccttccagaacagcctggcctgcacacaaacccttctgggatctgcaggccaaaggctgagc

SEQ ID NO: 5531 - DNA, 661 bp, Homo sapiens
  TAF4
  misc_feature [331]..[331]: Chromosome 20, SNP identification no. = rs2273991
  misc_feature [331]..[331]: allele = c, in linkage disequilibrium with rs6142925, respectively
  misc_feature [331]..[331]: n is a, t, c or g
agcactttcttcacagagaaccttcctccccagatttgacgtagtatccagtttaaaaaaaaaaaaaaactcctaaggcctgatctctgcatcaaagaaatcacacttcgtggcccctgcagcctcaagagatccgccgcctgccctctcacctggacgccgggcgagcgctgcagggttgcactgggctgcaccgttgtctgggcctgagacacttgcttaattatggtagttggggtcacctgccgtgcaatgataggtgttccaggtgcctgaaaaataagcagagtcacctaaaacgagcgcaagtaaaaggaattcccacccccangtacacagaaattattccttccatatgtaactagtatatccaagtgggtcccaggcttatccgtgatctgcaatgaagccactgtaattctaaagttttcttaccaaagaacaagtgtatgacaaacattttcctatactacaataaacatatcattaggcttcttaacagagtctacaaaaggtcatctctgaagaacgcaggtatctagaaatcaatcctcgtgctgctggcttgtgacctcgttaacaatcactaaaaaggatgcaaaggcagacggccagtcagtgtcgcaaaggggtagggaggtggccgcccctaggctagatg

SEQ ID NO: 5532 - DNA, 661 bp, Homo sapiens
  TAF4
  misc_feature [331]..[331]: Chromosome 20, SNP identification no. = rs6061956
  misc_feature [331]..[331]: allele = t, in linkage disequilibrium with rs6142925, respectively
  misc_feature [331]..[331]: n is a, t, c or g
ggcccagtgtcccttgtggtcaggaaagttggagaaggaatcaaacgtcccacaagaagtgaccatgtgacttcaggcaggtacaacgtagcttctcgaggcattgaaaatatctgtgaaccaagcgcgagtggccacgtctcctaagccgaactgaggtttgcttccaacaaacagcacataagaggcgctgtcactggggactttcttgtccgcctccctggttattgtatcacagcctgactgtaccaaaaagcaaagtcagacactgtgtgatgatctgaggacactcagaacaccaacggctgcatccacgccatgtttccgagangttctcacagttctgggtcctgtgagctctgtttacggacaaataatccagcagcatctattcacgccaaggcaaagaagtgcaactccgtctcaagacataactaatttaagagtaatcaaccgtggttacgggcggcacctgacctacgaaaggcagccgcccctcctgcctctactcctctctctgcacttgcagcagggtacacgtggcaggtgtggcccccaccccgccccacagatgggaccccaaggccagggcggagggttctgtctgagagctccccagagagagccacgtgggacactggccgtgtccccacccaggtct

SEQ ID NO: 5533 - DNA, 661 bp, Homo sapiens
  TAF4
  misc_feature [331]..[331]: Chromosome 20, SNP identification no. = rs6142922
  misc_feature [331]..[331]: allele = a, in linkage disequilibrium with rs6142925, respectively
  misc_feature [331]..[331]: n is a, t, c or g
agtgtgaaactctccactctcccagcggttcaaggccacactgcttgaggcgggcaatgcagagccagcagtggccacgagacgcctccctggggaaggagcagcgtgcactcctccaaagcctggccagtggccagtggtgaccagtggtgaccagtgcctcccccagagccttccagggacccacgtccccagctcagcatgccgccaccgattcccacagtgtgagtgaatcccaccctccctgaggagaaacaccagggttcttaccccacacaacagttttcctgattccttttgtaggtaacacttttactgtacttgaagccanaatgtagagcatgcgaagctgtgccacaaccacacgggcacctgcaccctgggaacccccacctgtgggggaaatgcctttgccgggtgccgcaggccgccccgcactctcagcacaaaccccggccctgggcctggggctgtggactccgccctggcctcctgaggcccagccccggctacctcttggccctgcaccacccgccctggcttggctctgtctgtggctctcctgtgtagcccaggtcaggacacatccctccacaggggtccatgttcacctctgccaaacccagggctgtgaccatcctgctatgcaagtcactccgga

SEQ ID NO: 5534 - DNA, 661 bp, Homo sapiens
  TAF4
  misc_feature [331]..[331]: Chromosome 20, SNP identification no. = rs1555577
  misc_feature [331]..[331]: allele = a, in linkage disequilibrium with rs6142925, respectively
  misc_feature [331]..[331]: n is a, t, c or g
gaggggaccactttggaacgtgtatccacatggccctgcctgtacagccacctcctgaggttgccgagtgagtgtcagctagcgaccgtctggctgcccagccgcagtccgcagagccccggcccagcccacgcagccctggccgactccgcgttgggcgcgcacggcccttggctgtgaacacgctgtttgagtcgagccaagtgctgtgctgcttctgctccctgtgcaggcagctgtgtctcagcagctagaagggctgtgggttcccaggtgcttactgccctgtggccagccccagcgccctggccctccggaccctgtgcctggncatgcctgttcctcccttctgcttcatccttgagagtccccttgtttccttggggttcagtcccatgtttcctggatcctgtcttttgttttcttcacttattcccttgtttaagtggcttctcccttcttacagaatataccttttttgagacctagtgtgtctgaaatgcctttttttgcctctgagccttggtgggtggtttggcctggcgttgagttccaggtggaaggtaatttcccggggggtttcgaaggtgctggccatctcttcccgtttctgtggagctctcagggctgctgagctctccttccccgtactgtggctggg

SEQ ID NO: 5535 - DNA, 661 bp, Homo sapiens
  TAF4
  misc_feature [331]..[331]: Chromosome 20, SNP identification no. = rs1886008
  misc_feature [331]..[331]: allele = c, in linkage disequilibrium with rs6142925, respectively
  misc_feature [331]..[331]: n is a, t, c or g
gctgccctgggcctcactcttcacccaagcatggagaggtgggaagggtcagggctggctgcagaataaaggcagcccctctggaaggcccagaaaacacaaacggagccaccagcaggcagcctcatccccagcagagaggagcatggtcctcaaggaataagctaccaaaagggccaaagagatgagcaaaagtggtgtttccctgcagtggaaaggggtggtctgaagcctgagggtttgcaggcccacttccctctgtaactaggacattcgaaccctctccatgctaccagctgggaccagtggtggacagaacacacgtggtganggcccagatgtggaaagggcccctccagaatccagcgtgcgctccttacacaggctggctttctctctaagcgggtgctgtgctgtgacagatgcacagcctcatcttccttctaacctgttctggctaaagcaagtgttctctcccacctctcggggtttggcaggcataagggacggcgcaaagcagcacaggggaacatgtgctgcccggcgcaggcgctaccaccactgtaacccgaatattttgctaaaaattaaacttctgacgcagctcctggtccagcacttgcagccccccccccgcacattgcagatactattgtaaaat

SEQ ID NO: 5536 - DNA, 661 bp, Homo sapiens
  TAF4
  misc_feature [331]..[331]: Chromosome 20, SNP identification no. = rs7343378
  misc_feature [331]..[331]: allele = g, in linkage disequilibrium with rs6142925, respectively
  misc_feature [331]..[331]: n is a, t, c or g
tcaggtgctctccaggatgtggagcaaccagagctcctgggcaccactggtgggagcctctctgacaacagccctgcagttttgtagaaagttaaacatactcctcatgtaggacctgccattccacctgaggtgttttaagcaagcgaaaggcaagtgtgtggccttacaaaggcttgtacctgggtcattccaagcagttttatttctgatagccataaattggaagcaactccaaagtacaccaaaggatgaaagcataaacaatttctggtgtatctataatggaaaagcactcaaataaaatgggatgaactactgatacagcacngatgactctcaaataatcacaccgagttgaagccagaaaagagagagtacacaccatgtgatatggcttggctccgtgtccccaccaaacctcatttccaactgtaatccccacgtgtggagggagggaagtgactggatcatggggacagcttcccccaggcggttctcatgatagcgagtgagttctcacgacatctggtggcttcataaatggcagtttcctctgccctcctgtctctcctgccgccatgtgaagaaggtacttgcttccccttcgccttctgccatgattgtccccagtcatgtggaactgtgagtcaattcaacc

SEQ ID NO: 5537 - DNA, 661 bp, Homo sapiens
  TAF4
  misc_feature [331]..[331]: Chromosome 20, SNP identification no. = rs4266091
  misc_feature [331]..[331]: allele = g, in linkage disequilibrium with rs6142925, respectively
  misc_feature [331]..[331]: n is a, t, c or g
cttcccgagtgaaaataactgccaagttcacagctagcacacgaccttcccccaccagccctgcctcttaagaacactaggagctgcccgagagtcgtattaacaactctgttcaccaccacacacaaaaaccaggccacgttcaatgagttttactctacctgaccccgtgagcaacacagggacgtgagtgtgctgtcgatggcaccccaagcgatcacaccctccaccacactgcctttttaacagagtatctcactgagtagctcggagcatgaaacagctgcaggggttctcagctcccagcctccgaatgaaagtgcgtgctcangtctctgaaaaataacaccaagctagctcctttgatggaaaagggatcccccaaaatgacgcagaaggaaccgtggtcaggcctgaggagcaggccacaaagtaccagctctgtgggagctggctccagcccccatctccacaaagccgcaggtggacagactgcgcgcaccctccacaccctctggaaagccaggctccgcagaaacacgaatccagcaggccacactcggcacaggaaagagcagcctctcctgaaggatcagcagctctgctccgcaggcagaaatggggcctccaccaacccacccacggcttgctgccgccccgt

SEQ ID NO: 5538 - DNA, 661 bp, Homo sapiens
  TAF4
  misc_feature [331]..[331]: Chromosome 20, SNP identification no. = rs6061961
  misc_feature [331]..[331]: allele = t, in linkage disequilibrium with rs6142925, respectively
  misc_feature [331]..[331]: n is a, t, c or g
tttgatggaaaagggatcccccaaaatgacgcagaaggaaccgtggtcaggcctgaggagcaggccacaaagtaccagctctgtgggagctggctccagcccccatctccacaaagccgcaggtggacagactgcgcgcaccctccacaccctctggaaagccaggctccgcagaaacacgaatccagcaggccacactcggcacaggaaagagcagcctctcctgaaggatcagcagctctgctccgcaggcagaaatggggcctccaccaacccacccacggcttgctgccgccccgtgagtggagagctgggcccaacactctccccngggctctgattctaggatttatccttattccttaggtggtctgcacagcagtcagccaactcagcatcccctcatcatttggccaaatttcacaaatacgcagttgctcaccttagagcaaagttaaaacaccaacccgtggagacttctactcatgatttgtttcactcgttaattcctctgcgactcaacaggaatgcttaccctcgtgcctgtgtacaaaagagctacgtgcaaatcaacacaaaagaaatggcaacaatacaccaaactccgagtgagaagttcaccctgaagtttaaagactgtctttcacctcaaaatgcagag

SEQ ID NO: 5539 - DNA, 661 bp, Homo sapiens
  TAF4
  misc_feature [331]..[331]: Chromosome 20, SNP identification no. = rs6142925
  misc_feature [331]..[331]: allele = c, t
  misc_feature [331]..[331]: n is a, t, c or g
ctgagcagaggcctggacacccaggagccgcacctgctctgggatgctggaggtgctaaggggggccggtcagagtgaccaacagggacagacccacccaacacacgggttctggcctttttgcctaccagggcttctggaaactcaaacataccccccaaaaaaatgctacctccttgaattgaattctctttaagttaactttaaatggctgaggtattttggtaaaaatacttcaggatattacagttgacctttgaaaaacatgggtcaaacttccagggtccacttacatgcagatttttttcaaccaagcaaggactgaagatanggcattgacaggacatgaaacccacgtacacagagggctgacgttttgctcgcttgggttccacagggaacttgtatgtgcgtacggggccctggaaccatcccgagaacactgcggggcgactgtatctggcgccatcactttaggaaattcttagcacatggacacacctccgtgaacaggtacagtgcacatgcgtgtctgtcaagccacagcctgggagcagagccctgctgcaaacttcaacccaaagctgcttctaaaaagctcgtgagcagccttcagtgaggctggcatccacctgacctccaacacagatctccttcccga

SEQ ID NO: 5540 - DNA, 661 bp, Homo sapiens
  TAF4
  misc_feature [331]..[331]: Chromosome 20, SNP identification no. = rs1473739
  misc_feature [331]..[331]: allele = a, in linkage disequilibrium with rs6142925, respectively
  misc_feature [331]..[331]: n is a, t, c or g
acaggatataaagtcaattttttttattttaattgcatttattgtatgctgagtttattcccatgccacaagtttttgtttcttcagtttcttctggtacagttttcctctgtgcaacttcctcacctggcttgggaacaagtgtctttaccgtgaggatcgtctcaatgtgacggggcgccctgtatggatgaacccgaccaccagccctggaagtcccacagcgcatcctgggtgctcaaacaccagagagcctacatctacaccctcacattcagtgtgactctccacatttttaattgtgtgcagcaaaaattcagcgctcttttcnggtcaccaaccctgtgtccagccccactgtttggcctaggtacacctgccagctccacccctgccaagtcggaatggcatacactgtttctataaagggacgtctttcagacacttggtgacttctcacgtatgcatacccttgatggcctgggcagtttcacgagcgttcttaaagtgatcaagaagacctgaacctctggatttgcacgattttgtggggatttctgggtcaagtgactaatgaaccattttcacagatcatctcaggccgcttggggaagagctataaagtcactatttttaaaagcaatttttttgttgttttttt

SEQ ID NO: 5541 - DNA, 661 bp, Homo sapiens
  TAF4
  misc_feature [331]..[331]: Chromosome 20, SNP identification no. = rs10888229
  misc_feature [331]..[331]: allele = c, in linkage disequilibrium with rs6142925, respectively
  misc_feature [331]..[331]: n is a, t, c or g
gcagttcatagaaatgcgagcctcagtgtctcgtccctaggcaggtttcacgacaccatcgtcacaaagactaaacacggtgccagagacgacggcactcaagatgcttggagcaaagtgactgcttcagacctgctgcagaaacccaacctgtcacggagcacacagcagccccacggagcagcctgtccccaaggcagggagtcagcctcacccgctcaccccatcttcacccaacgcctactgtcacacgctggagttgtaagtactcacggaggacacctgacaaactgtttttctacaaccttccatgaagatgaggccacaacantcaaaacaggtaacacccagagcccccagaggacactgcagaccagaaggttctgcacagcagcgaccagggcacagcagcagaaggaagggctcctcccccacatgacctatcctcggcctctcatcatcctcccctccagggtcccggcctggctctgctccccatggaccactccatgtcccatcactcaccgctcccttctcctgccagtctggacctgggcacagcaagagtctcctcctggcacctctgccccataggaggcaacttctgacgactcttcccaaaacgccacaatgcctgcttgtgcttgtacatggagattcc

SEQ ID NO: 5542 - DNA, 661 bp, Homo sapiens
  misc_feature [331]..[331]: Chromosome 21, SNP identification no. = rs2824844
  misc_feature [331]..[331]: allele = t, in linkage disequilibrium with rs2824888, respectively
  misc_feature [331]..[331]: n is a, t, c or g
ctattttatgctaaagtgaaactgtcaaaatcagcaaatatttattgggcatctctgtgtttaagaaactcttcatatatccatacatgtcatatatatccatgtagatagatggatttccatatacccatgtcatcacagccccgtgctgtgggtttacaggacctaaagaaaaacattgctgcattaaaaataacttacaagaaaaggctttcataccaattatagtagaccacttataaggatttctaggcacagtaaagtagcatagtacttgactaatggttagataataataatgccattaatttgcagaagtcagtctcagggntggtcagtgcagtgagtgggtacttctgcaattctctctctctttttttttttattccaataaggctgtgctaactccaaatgccacattctcccattacaatgcataacactggaagaaaaaagagtagaaaagggaaactctattaccctatatttttctttaaacagtgaaaagtgtttctgaaaagcgcttatctgacttgcagagtaatgagggcaaaagttaatatgatacgccttgaccagtggctcttaaagtgtcatctatggcaagttgttagaaatccaaattttcaggttccaaaccaatcttaccgagttagaaact

SEQ ID NO: 5543 - DNA, 661 bp, Homo sapiens
  misc_feature [331]..[331]: Chromosome 21, SNP identification no. = rs2824854
  misc_feature [331]..[331]: allele = t, in linkage disequilibrium with rs2824888, respectively
  misc_feature [331]..[331]: n is a, t, c or g
gattttttcaaaagaaaaatacatgaaaagtacctaggtttatatttctctggccataattgaccagctacggttttagagatcaatttgtggcttgtgtgtttatatctgtccctttagacattgtaaatttttatacaaaagagtagctgcaaatgttctccttcccaactgacaaaagaagaagaagaaataaataaataataccgttaacatgaaagagttcataggtggtgtggaatttcaataggaaacctaagcctggattaaagggcttgatacatatacacttggatttctcatatgtaaaataaaggattacattaaatanccttctaattttaactttcgttacttcatgattcataatattgattcttaagaatcatttctctttgtttttttttttggataaataaatgccttgcatgtaagtataaaaaatactctgaatcagtcaccaattgttcttcttcagtaactatggtttcctatatacttgttaaaatgttctatcctcttactattgccaatttcacttactaaataatataaaaaagaaaaaaacactgttttttatacctttgtcaataaattatggacgtccatggttgtctacgtatgtggctgtccacatatagtaaatacatattttatgtat

SEQ ID NO: 5544 - DNA, 661 bp, Homo sapiens
  misc_feature [331]..[331]: Chromosome 21, SNP identification no. = rs2824888
  misc_feature [331]..[331]: allele = c, t
  misc_feature [331]..[331]: n is a, t, c or g
tgactcaagacaattcttcttccaatgtggcccagggaagccaaaatactggacaccccttgagagggaaggaaagccatccagacacagccgtgatggtgttccagctgaaaaggctgcagagaaggctttcacaactattggcaatttctgatctttggggatatttctgctacagtgtagtaagttacttgtttgattccaccaggataggagtattatcaaaatccacagccaccctcagttcttagaaactcagatgcccttgaatgcaggcatttacagaaaagagaatgagtcatttgtatagatggagctatttactggatgntatcatttttaatgccatagtactctctattttctttcctcttacgttctcattatcaagttttcctttggcacctatttctccagatgctaacagtgaatacaattttcctacccaaaaatttctttcaatttttgggtaggaacaaacagacatgaatataaataacagcaggggtagtttgctcttaaagatgttccccgggtgtttctttcttggaggacgctataattgtccaatttaactctgttagcattttggagaataacagatacatagaacagatatccttatggtagaattatctgagtgcaaatttgtttaacggca

SEQ ID NO: 5545 - DNA, 661 bp, Homo sapiens
  misc_feature [331]..[331]: Chromosome 21, SNP identification no. = rs2824902
  misc_feature [331]..[331]: allele = t, in linkage disequilibrium with rs2824888, respectively
  misc_feature [331]..[331]: n is a, t, c or g
ttgttattcttttaaaaagaaccttttcaaattattgcatatatatttaaaaattccttcacttgatatatggttattgtggaatatacttttacatgtatcagttactgtgtttctagtcacaaataatagaaattctaatcgaaactttacttaaacaatagcatggatttattattctaggtaattacaaagccttttcttttctgtcttcagtgatggtgtcagctttatccaaagcctggacttaaagggaaaatggtaacagtgtttccagattttatgtctgtgtgccacacagttcagtagaatttgtcccccagaagcctcnagcactagccttgcttaggctgattagctgaattaaatcccatgcttatcgatatatatggctccgattatgaaattcagctaattattttaggtctcagccacatgccccactccttgcaccaaacggggtcagtttcttaaaaaattagaggttcaataaggaaggcttcaagacctaagtgaaaactagggtagttggtagtcacctaagtaactattgaggtagtctctttgaggtagagactgcatttaggtgaagcagccaaaaaataaaatgaaataaaataaaatagcccaattagacttacccacctctttatctctctct

SEQ ID NO: 5546 - DNA, 661 bp, Homo sapiens
  misc_feature [331]..[331]: Chromosome 21, SNP identification no. = rs2825896
  misc_feature [331]..[331]: allele = t, in linkage disequilibrium with rs12482714, respectively
  misc_feature [331]..[331]: n is a, t, c or g
ttactctcaatgctagtttaacagactttctcaacccaattctctcaattcactggtgactgtttttaggctctccagaaaaagagaaggtaggatcattccctgaatcttgtctttctcttgagttgctgtatttagttgagaagtttcactggtcatttgtcactcaaagtatttattaaatcctatttcttattctttgggatcaaaaagaaggccgtgttttcactcatataagaacaaagaaataaatatcccaatctcactcttctcctaacttctgatctcttgctgctgctctccaatggccaaacacatcagggagcaaatnagacttttggtgcaggtcagtgtcccagggcacaaagcagagacgaatggagagtgcatttggagagacaaaaagcggatagcacagcacttacttcttacgatttttcttcatgtggatatggaaactcttttggttccagtttatattcttaagccctccatcgttaaaggaacacagaaatctttagtaacaattctaagacatattactacatatttaaaacctagacatatgcaattgaatttttctttaaatcattcataaattcactatcaatctcataattgtgaaatcacaagatatatctacttgaaattctgaaggtga

SEQ ID NO: 5547 - DNA, 661 bp, Homo sapiens
  misc_feature [331]..[331]: Chromosome 21, SNP identification no. = rs2825899
  misc_feature [331]..[331]: allele = a, in linkage disequilibrium with rs12482714, respectively
  misc_feature [331]..[331]: n is a, t, c or g
aagaataaagtaattcaatgctataaaaacatgaaaaggaaaagatgaaaacaacataatatttgctctcatggagctaatagaaattggagaccaaagtaaaacaaacagttaaaattctatagaaaacattataatgggtttacctatatgtgctatttgaggcacaaaaagttagacattatctctatcctggagaaaccaaagaaacatttgtgacatatcatttgacccaagtccttaagaattactgcagaatttttaattctgtatatccttcaaattcaagttcatatttcttcattacagcattttagatgcaggaacacanaggtaatttctcttgaatgtccctaaaaccatatttatgctttggagctaaacttctgttctagtttattctgagtgtgtatacatatattatctacattaataattcaatttgtgagaatttgattgcagtttgattatatttatatctccccaagtacctacctagtgcactaaatgactgtaacctacttaggacaggaaatcccaagagtcattttgattatgtaatgcttaaattcaatagttgcaatatatgaagactctatttagtaccttgaatctcagtagcaactaccagttaccagaaagtttctataacctaaagtta

SEQ ID NO: 5548 - DNA, 661 bp, Homo sapiens
  misc_feature [331]..[331]: Chromosome 21, SNP identification no. = rs2825905
  misc_feature [331]..[331]: allele = a, in linkage disequilibrium with rs12482714, respectively
  misc_feature [331]..[331]: n is a, t, c or g
tttttccttcacctgaattcaccatgaatcagaaacaaagatgtaaagatatacatgaaactaaatttactttgaggggggaaatccggtgaaactaatattgggtaagaatagagtaagattggagagacaattcataacaaatgggaagagaaatgtaatatacggatttgaaggtcaagggtgagaagccaccaacagcaaggaccagggaactggtacaaaaagtctattggacaagctattctcaggtgttgattgagctgcaccaagtcagtatttgtagcaatatactggtatcctgaaaggaaatgcagttcttgaataacantattttaaaataaatggtaaaaacaagaaattctgtcaatagcaaattattaaataggttatactccatccacattatgtggcataattcagcggtacaatgtttaggtgtagctactgtataatatgaatatatatgtaagtatgcatatacacatatatatgtaaatgtgtacacatgcatataggtatgcatatatatatgtgtgtgtgtgtgtatatatatatatatgcatatgtaagcctagagaaaaaaaagattggtgtccccaagccattacatattttattttgtgtatttatagaagggtgagggtggggttgagtagga

SEQ ID NO: 5549 - DNA, 661 bp, Homo sapiens
  misc_feature [331]..[331]: Chromosome 21, SNP identification no. = rs2825910
  misc_feature [331]..[331]: allele = a, in linkage disequilibrium with rs12482714, respectively
  misc_feature [331]..[331]: n is a, t, c or g
agaaaactctgctccccaaagagaaattgtccttttaataatatattcttagattagaagctcaacatgctgtaattttctcgtgaaacatcctgagttggctgttcataggtgcctacttgtggtgattggcgtccattaatcctggtgaggatatgaaaaccacacagctactagtttgacaaccactgcagcagtgcctcatgaacatagtgttttcatcgttcttccaaacactgtcaattaggcctttgaggtatagatttgcagtataagtaaaggacagtttggtagccatgtagcaaggatgagctaaaaagaccataccaanttgagctcagtaagttccagtacatacacaaaactgagcccacatcaaaacagaatttttacaccaggagcaactttgaatcttcattgggcttgcatgaaaatgtcagtgtggcttatggtgaagaatgggctcaaattatataaagctgagtagggtaaagactgaatgaaagatagattatattctacttgagtagagtcagtaatggataacaaggcataaggacataatttcacatttgaatggtgttttattttgaagatatgtaagaatgcacacatatactactatacacatacatacatatgcattcaccaggactatgtc

SEQ ID NO: 5550 - DNA, 661 bp, Homo sapiens
  misc_feature [331]..[331]: Chromosome 21, SNP identification no. = rs12482291
  misc_feature [331]..[331]: allele = c, in linkage disequilibrium with rs12482714, respectively
  misc_feature [331]..[331]: n is a, t, c or g
caatatttcttgctctgactacactgacttcatcatagtatcttagactttcatagttttaatatcaactgggcaaattcaagctagagttcttcaactgggtttcaggcttgggatgaatcctttgtggttctcagttacgttctctgaactcttggttctgactactaggcttttagttctaacccctgatttctagcttctaccctctgagtcatccgtcatatttcatggaaattaccacctgcttcgaactaactagtttatcagcctacgctggccagtataattttgggggtccaacaggattcttccattctgtgctctctcngtccttttcagtcccaaacggaaggatttctgatgggaaaaattcaagaaaatcatgggccatgcatgaattgcactgggtttcaccctcttagacaaaatccatttccagacatattcctgctgtaatattttttctattgttggctttagtcaagatggctgtgggaagctcttaagcttcctctgatttgattaagaagaactttgaagcacacccttcctctattgtgcataaacatactgacatgttgatctgtccaaaaattcaggaaaaaacttgtacagaaatatgctcccttttttctataccacactttaagctgggata

SEQ ID NO: 5551 - DNA, 661 bp, Homo sapiens
  misc_feature [331]..[331]: Chromosome 21, SNP identification no. = rs2825922
  misc_feature [331]..[331]: allele = a, in linkage disequilibrium with rs12482714, respectively
  misc_feature [331]..[331]: n is a, t, c or g
gtttattgtgtttgaaagataaagcagctttatatttaattaaattggttttttgaatcacacttaagcaaatacttaacacttgcacaaaatcatgtctgactttctaaattctttctaatactttttgttttgtaaatttttctacacatgaattatattacaaattatgttgtaattcaaatttgttatactttggtggtcattttttctaaacaacttcagaattgtatttttagagatttacatatttcaatgttgtcatgcacatttcaaagaaaattatatggaccagttttgtttcatgtaactgtactattttaatatgatngatgacttcttctttagtacttgagtaaatgtctcttattacctgaaatttctctgctttattcattcattttttccaactttatggtgataacttgtttaaaaagcacactttgtttctaacttggtaaatacaatgttttcttcattgtcttatgaaaaatagtgtttatgtacaatcaaatattatactttttcactgaaaaattatggctgcttcatatttatgctgtaatgatatttacagcattatccaaggttatggttttatagtgtgtggattttgagtgcctccgtaatatctcaaaaacgtctctttgcagcgtttatt

SEQ ID NO: 5552 - DNA, 661 bp, Homo sapiens
  misc_feature [331]..[331]: Chromosome 21, SNP identification no. = rs13047152
  misc_feature [331]..[331]: allele = a, in linkage disequilibrium with rs12482714, respectively
  misc_feature [331]..[331]: n is a, t, c or g
atatttcttaaattattttaatttttactatttctaatatttttgtattttaatctttatattagagatataaatgattcatacacaatcattgcagtattagagtattctttatttgactctgcacctatttttatcagtgaattttatactttcaaaatatttgtgtgtgtgtgtgtgtgtatgtgtgactcattagcatccttttctttcagcttgaagaacttcctttaccattgtttataagacagatttggagttaaaaaacaaataaaactccctcagcttttgtttgtctggaaaaatgtttatatctccttcacatctgaangatggatttgctgactacagtattcttggctggcagtttggttgcttttttcctttagcactttgaatatatcaacccaccaacctcctggctggtaaggtttctgctaagaaatccactgatagttatattggcactcttttgtatatgatgtgtttcttacctcttggctgctttcagaattttttctttgtctcttttttttttgataatttgattattttatgttttgttgtatttctctcagggtttaattttcttggagacctctatgcatcccatatatgtgtgttggtatctatcacaggttaatgcagttttcagccatta

SEQ ID NO: 5553 - DNA, 661 bp, Homo sapiens
  misc_feature [331]..[331]: Chromosome 21, SNP identification no. = rs12482827
  misc_feature [331]..[331]: allele = c, in linkage disequilibrium with rs12482714, respectively
  misc_feature [331]..[331]: n is a, t, c or g
agatggaattttactgtatagattattttgcatctggcattttttatttagtgagatatccagtcaatattaattttcatcattgttatgaaatattttattatatgaaaatacaaaaatagtgtgggtgtgtgtttgtgatctactacaaatgtgtagttttcagggttttttggctattgtctaacaacattggctattgtcttttttattttatttattctagtgtttgtgtactaaaatttaatcgtgattttatcttgaaggtctctgttgactaatgaggtagagcatgttttcctgtgttttagctgatccactttgtaggcancttttccagtgtttgcatttttgatctcttgaattgtctgactgttatgggttgaattgtgttcctcaaaaattcatgtgttgagttcctagcacccagaacctcagaaagtgactttctttgaaagtaaggtcattgcagatgtagttaggtaaaatgaggtcatactgaagtagggtgggctctaatataatatacttgatgcttttattgaaagggaaaatttaatttctgatacacagacacatagcgagaataccatgtgaagattaaagaagacattgagatgccttagcagaagtcaacaaatgccaaacattgccagcccac

SEQ ID NO: 5554 - DNA, 661 bp, Homo sapiens
  misc_feature [331]..[331]: Chromosome 21, SNP identification no. = rs377685
  misc_feature [331]..[331]: allele = t, in linkage disequilibrium with rs12482714, respectively
  misc_feature [331]..[331]: n is a, t, c or g
gttgccattgaaaccccgtgtaattacttttcagtgactggtgttagggataatttgtgttctgcaaggacacttctctggtttctggtcaaatagctcctttaaaaaaatttttcttgccctattgtgaagttttcaagaagattcagacatcccccaaggtagtctataattccagatgaccagtagctcttggaagaagactaatttccaagaagacattagagaaaatacaaacatctttttttgccagagacaattcatttattctaatacatttgttgattattactgtgacccatgtactcttgtaggtgtttagcatagttcnatgaataaagaagcccctgtacttcaataggtagagacagaattgatgcatgcctgtcagatctccatttgtgagggatgtaattaactgccaattacagatattatgctctaaaattagtcatttgtgccaagggaatgctttctgttgtttctctgtgccaacgattgaataaggcaagggtgttaaaggtgatctcattcaggagggtgatatggttcttctttgatgggacattttgatgcaagaactttacaatagccttgtcaagtctcttaggtctgtatagcaggctaagttgcttcatcctttactttgttctttttatcc

SEQ ID NO: 5555 - DNA, 661 bp, Homo sapiens
  misc_feature [331]..[331]: Chromosome 21, SNP identification no. = rs7281221
  misc_feature [331]..[331]: allele = c, in linkage disequilibrium with rs12482714, respectively
  misc_feature [331]..[331]: n is a, t, c or g
tcaaaatcttaaggagatgtgtgtgactttcaactccaggagctccgtgatagcttgcctcatattttcctgaagattaccattgcaaaatggtgattttccacctgacacaacttgttctcattcaaaaaatttctctgtaaagtattacaggtaacagaataactggagccaaaattcctcttagtaaggaaacttatgttagaggaaaatagctgcttagaatagaatgtttaatgtagaatctcgttaaatgtgggcttctctatgacagttaatggaaagagctggacacataagagatgcagcaaattctttgaaagaaaaaacnaattcagtaaagaaaatgtgatacttactttaagggatttctacagaactgtaaagacctaatcctacccaacccagaagaattaaatcttagggaagcaaaatgatgttcattggaaatggaatatagattcaaacttaactagagtttagtgacacaaaaccttgaagtgctttcaggattacataaatttctggttaaaatttaaatctttcatctgatggagtagctcattaacttccagggagaagggaaaattatatgaagtagcttacaagatagaggttcttggcccagcaaaggttgataacagtggagagtgtgctaaag

SEQ ID NO: 5556 - DNA, 661 bp, Homo sapiens
  misc_feature [331]..[331]: Chromosome 21, SNP identification no. = rs2825928
  misc_feature [331]..[331]: allele = t, in linkage disequilibrium with rs12482714, respectively
  misc_feature [331]..[331]: n is a, t, c or g
aaatgtgatacttactttaagggatttctacagaactgtaaagacctaatcctacccaacccagaagaattaaatcttagggaagcaaaatgatgttcattggaaatggaatatagattcaaacttaactagagtttagtgacacaaaaccttgaagtgctttcaggattacataaatttctggttaaaatttaaatctttcatctgatggagtagctcattaacttccagggagaagggaaaattatatgaagtagcttacaagatagaggttcttggcccagcaaaggttgataacagtggagagtgtgctaaagttttgcagagttantgatttcctcagcagacaggtgaactgagttgggcctatgtgacccagagctctttgttctggcaactcaggctgtgagcaacctttgacacatcaatttttgtcacggattattatgttttctgtgtgagccatgatatgaaattgctgggaatcaataatttatgataatacattgaaagtatcctgagcaatggggaatccacgtggagtaaagcaccaggctgtggggaatcctcagaggtcatcatatttctttacaacgtccccaaagtgataactggcaatatttcacttacagttgataataacttttagaggtggatacta

SEQ ID NO: 5557 - DNA, 661 bp, Homo sapiens
  misc_feature [331]..[331]: Chromosome 21, SNP identification no. = rs2825930
  misc_feature [331]..[331]: allele = g, in linkage disequilibrium with rs12482714, respectively
  misc_feature [331]..[331]: n is a, t, c or g
tttttttaggggaaatcacactggtagtggaggtaatttgtttttgcagaaagaagtgataatgttgtgggaggataaaaatagtggattgaaaatgattgtagagcatcaaaacacccaattttatgttatattttctgttgtgttgtaattaaaattttcattatctgtgacttcagtaaagcttctacagaacaaaaccttatcaccttatttactgtatggtgcaagatgaagtatgtgcttattaaccctctatgtagttttaaagaatgtgaggaaagtgactgagctccatatgcaaatagaagcaaggagcaagacatcagtnaaattggacagaaagaaaaaacacagattttgggatgatttaaacagcttagagctatcctccaaccatcactatgactaccaagtctttcagggattagcagggatgcggtgctataatctggaataaaacaatactaaacatcaaataatatttgagtcatgtaaatttcaaaggttgtattgttgatacagaaacacctgctagtggaaatattgtcaaaactttgtgtgtgtgtgtgtgtgtgcgcatgtggtgtgtgtctatgtgtgtgtgtaacaaaacaacattgaactttggcaaatagacttgcttaatccaaaaaatata

SEQ ID NO: 5558 - DNA, 661 bp, Homo sapiens
  misc_feature [331]..[331]: Chromosome 21, SNP identification no. = rs12482714
  misc_feature [331]..[331]: allele = c, t
  misc_feature [331]..[331]: n is a, t, c or g
aagtatagaagctgatgaagaatcagagagcatatgtaggtgtggatgtttaaaaaaatagcagtagagtctttgacactcctcctggttagtgttagggtatatgcttcctcccattgaatctgggcagacttttaactgctgtgactgtaatcgagtatggcagaagtgatactaaggcatgtctgatgttttcataggctgtgacagttgcacagactttctgtgattttgatgattttgacatttaagaagtactggtcaggcagctttagaatgtccctcacttgtgacctgtctcatatttttgtcatgatcagattagtgttanggaattttaggcagaaaaccatggaggtaaagtgccattctcatcatggatattgaggatgcacaaatatattattagaatgactcattactgttaatttttttttttttttttttttttttttgaggtggagtcttgctctgtcccccaggctggagtacagtggcgggatctcggctcactgcaagctccgcttcccgggtttatgccattctcctgcctcagcctcccaagtagctgggactacaggtgcccaccaccatgcccagctaattttttgtatttttagaagagatggggtttcaccgtgttagccaggatggtctcgat

SEQ ID NO: 5559 - DNA, 661 bp, Homo sapiens
  misc_feature [331]..[331]: Chromosome 21, SNP identification no. = rs2825941
  misc_feature [331]..[331]: allele = c, in linkage disequilibrium with rs12482714, respectively
  misc_feature [331]..[331]: n is a, t, c or g
gagaattaaatttttcatatataaatatctacatcccactgaaaatgtgaagcaagcaaagatgataatataaaagtgcaaaatcaagtttaaggccatccattatccttttctattaacatatatcatgttactattggctcgtctacttttaaacagcaattctcttttatgtaaattaactaagagttcatttagaaatgatatttccccttataagtattcattttgtcagcttaagtaagagccaaatgatctcagatcagattcaatagggaaactgctgaagggaaaataagagaatcatgaaagagaatagaaaatcaatacntagcaattccccagaaattaaatgactctagggtggaggggtcccatgggacatagagagaggtagctggttctaaggatttgtcaggtctaaaccattagcatttccattaccaactcttcttttctgaaggggtattagaatgaattagaacctggtctgagtgcttagatagagcattatcatcaacaaaatcagtaatgttgttagcatcagggaagacacacatggagcattttccctctcctaagcagaaaaaaagatggaaatcttcctaaagactcaggtaatatgaagcatatgtacatgttttcgaggacatgagccctt

SEQ ID NO: 5560 - DNA, 661 bp, Homo sapiens
  misc_feature [331]..[331]: Chromosome 21, SNP identification no. = rs4402842
  misc_feature [331]..[331]: allele = a, in linkage disequilibrium with rs2250059, respectively
  misc_feature [331]..[331]: n is a, t, c or g
agccaaacacagaaagaaaaatattgcattatctcatatgtggaatctatttcttttaaaagggcaaatatacagacacagaataaaacagtggtaaccagggattgaatggagaaggaaagtggaggatgtatgtcaaaggatacaaagttgcagatacataggatgaagaaggctagagatcaacatgaagatgtgaaaaagactatagttaataatattgtagttttcgggatctttgctaaatgaatagattttagccgttcttagcacacaaaaaaataaatagctatgtgagatgatagatattttaatttgctttattatactnaccattttactatgtgtatctcacatcgtgttgcatacaccttaaatatccacaacacgatttacttaacaaataaaataaaccaatgtttattcaaaaaccaaaaaagaaaatagacatgaaaactccattttatgtatttaacagcagattagacacaggtgaagagaaaattaatcagtagaaagataggtcaaaagtaaacattcaggtagaagcataagcaattaaaagaaggaaaacgggccaagcgtggtgacttatgcttgtaattccaatgctttgggaaggctaagacgggcagattgcctgaggcccagagtttgagac

SEQ ID NO: 5561 - DNA, 661 bp, Homo sapiens
  misc_feature [331]..[331]: Chromosome 21, SNP identification no. = rs13052483
  misc_feature [331]..[331]: allele = t, in linkage disequilibrium with rs2250059, respectively
  misc_feature [331]..[331]: n is a, t, c or g
aagagatagtgaatctttaacacacttcaggactcagggcaccacccaggtctaaggtaacttgcaggaatatgacatgggtataactttcaagagctttgaatttatttcttaaaagagctcaacataaaatcaaagtgagagccagaatattttagcttccttctctgttctctttatcttttactccatgtttcatatattaacaaaccctgttgatactaactttaaaatattttgaaaatgtgtccatatatgattactttcatttatactacatactccatgacatcatcacatttatgtcaattgtctcctaatttgtctcccngttctgcccttgctctctattcagtatattttctccaagtaacaagaaatcttcagttaaggcagaagtcatgtctctcaaaaccatccattggtttcctgtttcagtcaccataacagtcaaagtccttagaattgtatatgaagcactctgtgcttacctctttattacacttttttttgtttcttttttaaaaattttttttaacttctttatttcaataggtgattggggaacaggtggtgtttgtttacatgaataagttctttagtgctgatttccgagatttcagtgcacccatcacccaagcagtgtacactgtactcaatg

SEQ ID NO: 5562 - DNA, 661 bp, Homo sapiens
  misc_feature [331]..[331]: Chromosome 21, SNP identification no. = rs6516641
  misc_feature [331]..[331]: allele = t, in linkage disequilibrium with rs2250059, respectively
  misc_feature [331]..[331]: n is a, t, c or g
agaggttgagttattcatttgattctcagcttgctcactgtaggcgtatagcagaactactgatttgtgtacattaattttgtatcctgaaactttcctgagttcatttaccagctttaggagctttttggatgagtctttagggttttctaggtatgtgatcataaccaacagcaaacagcgacagtttaacttcctctttattatactttctagtattctctcctttccttattttcatagaagctgcaatggttccatgcttgtacccaacagacacatgggtgactcatggctttgctcttcttccttatacatgaaaactctcccnccaacatagccatgcggctccaaggtacacctcctcaggatctttgctaaactttcttctttagtaaacccttttcttgaccctgtaagataagaagttctcatctgttatggtctagattgacaacatatcaaggcatgtataataggtaaatgcttctcaaacagcctgaggcttgtttaatttgggctgtgtttttcctgtgattaatatgtatttcattcaactatatatgaatatcttatataaaacagtataatgtataacaattctgaggacagtgcttttatggaataaaacattcaatttttttagttttctgagcctaac

SEQ ID NO: 5563 - DNA, 661 bp, Homo sapiens
  misc_feature [331]..[331]: Chromosome 21, SNP identification no. = rs6516643
  misc_feature [331]..[331]: allele = c, in linkage disequilibrium with rs2250059, respectively
  misc_feature [331]..[331]: n is a, t, c or g
tataggcaaaattcttatctgttaaaagggtgattactatatgatcacaatattcttcgataatatgatcagatttgtcttctcaaaatgtcataaagtaatatttcaaaaagcattctcaaaacaggtaggccacagtctgctaaataaaaggaaaagaaaccagtgtatattcattaacaagtaggtattccttgaatgaatatatttttggctttttactctttttagtgttgcttttgcttctctggacacttccccctataaaatgattagttgccatgctcagatgtcatgtgttgaatctgagacaagagttgccaaagtatantgaaatagaatcagacattcaaaaagaccagccacctctttagtgatagctccaagacactattattttgatactgaattttctgcatccacccaagataaaaatgtttaaacctatgttaataatgtaacttaaacattaagaattgttttggaatgccaattcatctcctttatgtgcatcgaagagattaagttacctaagatgctttattttggaggatacaaatatgctgattgcagcagaatctgccctggaaagaatgtaaataacatagtgaatggtgaactcagtgcactgcatttatcttctagattcattatcaaagtg

SEQ ID NO: 5564 - DNA, 661 bp, Homo sapiens
  misc_feature [331]..[331]: Chromosome 21, SNP identification no. = rs2829434
  misc_feature [331]..[331]: allele = a, in linkage disequilibrium with rs2250059, respectively
  misc_feature [331]..[331]: n is a, t, c or g
agaggattgagttgaggcataaagagatttcaagaaacactaactcagtcttaccagagtcattagcagatttcttctttttttttttttaatttgggtaactgcttgtccctggtagagttgggtacagctacattctattgcaacaacaaatgcaaggacaaacatggtgattaaggtaaaaacatagaactcagagtttgctggtgcattgtcttcacagagcaatagttactacaaacctatcaccatcggttatatcatcaaaagatcacaagtgattacaggtaaagttctcatcgataaaggcaataacatgagttcaaatatnggtcagatatcagagagattccatatcaacaaaaaaaaataatatgtggtgactttagaatatgattgcaaattacttgacagtcttctcattaagactgtcatctcctaaaatctggtgggctagtactatttcaaccatttgagtataactgaagttatgccggatgattgttttagttgactatggtattgccataatataataccacagagtggatggcttaaacaacagaaatttattttttcttttagttctggaggctagaactccaaaataagttgccagcagatttggcttttccagaggtttctctccttggttgcagac

SEQ ID NO: 5565 - DNA, 661 bp, Homo sapiens
  misc_feature [331]..[331]: Chromosome 21, SNP identification no. = rs1892725
  misc_feature [331]..[331]: allele = t, in linkage disequilibrium with rs2250059, respectively
  misc_feature [331]..[331]: n is a, t, c or g
tgaagctaggttataacagattgcacgacctccaattttaatgctggaaaatttaatttcatagccttgagttgtcatttaaaatattaaagtaccttgagactacatgctgtgaaaaaacaaaagttgtctgtggggggcaatgcagagagcagccattccatgttttaaatgagacttgaagtatacatacagatacatagataggttccatggatgtgaatatgttgcatcatcaagttattgactttttactttctaccccttgggactatagttgcagtgtctggatcagagaataatgtaatattgaatttgaaagtgaatgtangaagaaatgaacatgtgaatgctggaatgtcccaagacttggttctcagtctcttctcaatgtacaagtgtatctcattattattcccagttatttaagttgtggcagattacataactggaggcaattaagccaaatttgaacacatctgtaggatctcaaagctcactgtctaatgcatgtatcgataatctctcattttcaagtatatctccaaatggacatataaaaataatatatttatgtaactactgtaaaatatatgtgacttttggaagcaataaggatgatcagaaaacacagcttcaagtagctccaattgcaagcttt

SEQ ID NO: 5566 - DNA, 661 bp, Homo sapiens
  misc_feature [331]..[331]: Chromosome 21, SNP identification no. = rs1892727
  misc_feature [331]..[331]: allele = g, in linkage disequilibrium with rs2250059, respectively
  misc_feature [331]..[331]: n is a, t, c or g
aatcacttaactaagtatttcttatcacatctataattatatgcttatttgtctgatgaatacataaggcattaactattcaactattatcagatttttcaagaactatgacaattagcatttaatgaatgattacatgtataatggcttaatgcatcatttgctttaatcctcacaatgacacacctaggatctgcagagctagaattggaactgaaacagtgtcagtctggaaatcacaattctgtatttctgaaaaactttcttttttgtgaagacatttgtttacatcactgggaagctattagtagggcattagaaggaaacagantttttttcagtataaaatatgtttcatgtcactcatgtataaagtgacggtagcatccttaaatccccaggttctgagtacacagttcctaagctgataattgtctgctttagttgaatatttctcgcgtttttaaaatctcatacatagagaatagatctgttcattcttcatgagagtaatagcttgtgtctagtttgctttgtgtcactatctttatcttttactctgtttatgacaccttctttgtgcctttttgccagagaagcttcttgttcttctgctaattctgtcagctgggctgatcaaatgataatatttggctagttc

SEQ ID NO: 5567 - DNA, 661 bp, Homo sapiens
  misc_feature [331]..[331]: Chromosome 21, SNP identification no. = rs2829438
  misc_feature [331]..[331]: allele = c, in linkage disequilibrium with rs2250059, respectively
  misc_feature [331]..[331]: n is a, t, c or g
atatgtgccctctttaagagacatcagattatgcatgagacaaaattaaatggtgaaaagatacaacaaacaaaccaaacatttccaaaacagtctttttcttcaaaagcttgtatacatctttgtgtcagataacctgtcactaagactgtattaggaatttaaaatgcctgtaacaaggaggagtgctgcagacctacataaaaaattcaaagttgatgtaaatattttcctgggaactagaagtattacaaatataaataaaaaatattttaattacaaagtttagagtatttgttctgttaaaataccataaaatacacattgttangtattcttagtttagtatgtgctgtggactgaatatatgcatctccctcaaattgatacattgaaatcttaactttcgatatgatggtatagaagtgaggtctttaggaggtcacaagttcattaggaaggaatcctcatgaatgagattaaagtcctcataaaagaaaacagagggagacccctcacccctttctccaagtgaggttacagtgagaacatagctgtctatgaggaaacagggcaccaccagacactgtatctgccattgctgtgattgtggacttcccaggctccagaattgtgagaaataaatttctgttgtatataa

SEQ ID NO: 5568 - DNA, 661 bp, Homo sapiens
  misc_feature [331]..[331]: Chromosome 21, SNP identification no. = rs1012660
  misc_feature [331]..[331]: allele = t, in linkage disequilibrium with rs2250059, respectively
  misc_feature [331]..[331]: n is a, t, c or g
ccaaataaataagtcatagtccacctatttttctgcccccgtcctataagtgatcagactcaaacttacggaaagaaactctaatggtctcatttgtttttagagctggtactgagctcatttattttatttattttacttaaataaatggaaatactggtgtctatttaaagcacaactggacaaacctctggaaacattttcttgttactccaaaaatgtacaataaaacactataatacaaaatgcattattaataacacacagatgtcctgaatatttcctttagagttttcaattaatgtaccgtggtttcaagttgcaattattntacagtgcagagtgaagggaatgctcattgtgatcagttctttctctgttctttagtcaaaggcaaagcactctgtaataaaagcaacaatatttccttaaatttgatgtgagtgttgggtctagggacaattataaattcaatttgaaaaggcatattctttaatatctggtatttaatgactggaactatttctgtccggtgtacaataaatgacatttcatgctaaccaaatgtctgagttttctttttgttaacattggtcaatatagagctgtttttaataataaatgtagtttatgacccctcataattttacctataaccctt

SEQ ID NO: 5569 - DNA, 661 bp, Homo sapiens
  misc_feature [331]..[331]: Chromosome 21, SNP identification no. = rs1012662
  misc_feature [331]..[331]: allele = a, in linkage disequilibrium with rs2250059, respectively
  misc_feature [331]..[331]: n is a, t, c or g
atttttctgcccccgtcctataagtgatcagactcaaacttacggaaagaaactctaatggtctcatttgtttttagagctggtactgagctcatttattttatttattttacttaaataaatggaaatactggtgtctatttaaagcacaactggacaaacctctggaaacattttcttgttactccaaaaatgtacaataaaacactataatacaaaatgcattattaataacacacagatgtcctgaatatttcctttagagttttcaattaatgtaccgtggtttcaagttgcaattattgtacagtgcagagtgaagggaatgctnattgtgatcagttctttctctgttctttagtcaaaggcaaagcactctgtaataaaagcaacaatatttccttaaatttgatgtgagtgttgggtctagggacaattataaattcaatttgaaaaggcatattctttaatatctggtatttaatgactggaactatttctgtccggtgtacaataaatgacatttcatgctaaccaaatgtctgagttttctttttgttaacattggtcaatatagagctgtttttaataataaatgtagtttatgacccctcataattttacctataacccttaggttttaaaaaggtaaggttaaatt

SEQ ID NO: 5570 - DNA, 661 bp, Homo sapiens
  misc_feature [331]..[331]: Chromosome 21, SNP identification no. = rs2226391
  misc_feature [331]..[331]: allele = c, in linkage disequilibrium with rs2250059, respectively
  misc_feature [331]..[331]: n is a, t, c or g
ttaggttggttggggtcacaatttcacaatgtatacatatattaaattgtcatgctgcataccttaaatatatataacttttatttgtcattaatatctcagtaaagctgaaaaaataaaatctaaaaagaaaagctacagtccatattgacactagcatagaacaagtgtgtttttctgtttaataacaactatgtcagcataaaattttctctgtgtaaatcctgtcaatttttgtatgagagcaagaacagtaaatcaagcataaaatatctcagattatttatagattctaaaattcccttcctgttttatatgctcaataaactanatgtttttgttgtccatatgggagccttatgaaaacaaactgaagaacagacttaagatgttatcgactgtaatgaataacaattacatatggactcatttgtagagtactccaaaaaataaaggttaccaagaaatatactaagtgtttacatttttctaagaaatataccaataactaattttctatgttctgtcaaatttttaaagaggtaaatgaaaaataaaaaagaataaaagtaagtgaataaaatgacagaaaggaaatatttgggggaaaagatgaaataagaaaaacaatgagttgataactattgaagctgaatgatgg

SEQ ID NO: 5571 - DNA, 661 bp, Homo sapiens
  misc_feature [331]..[331]: Chromosome 21, SNP identification no. = rs2829441
  misc_feature [331]..[331]: allele = a, in linkage disequilibrium with rs2250059, respectively
  misc_feature [331]..[331]: n is a, t, c or g
ttattaaagtcaagatgtatgagagagagaaaatgacaatacctttaaagaaaaaaatctagaaaaataatcatctcttggtatagaaatatcttaaaaatatgattaaaaagccatattgacaggatgatacaatttacttatttaaaattttaatcatctctgtcaaaaaaagaatagaaaaacaattatgaaaattgacaacttgaggaaaaacttggttcaattataagggacttttactattcataataaaaggtttctaaaaactaatagatatatgacatccagttagaaaactggccaaagaatattgaacagaaaatatccngaagaacatatccaagtttgcatgtatacaccacaatgatgacactggctaattctgggaaggtaaataagatacataaggcgactcaagggacatattggcatcttctgcaatttttacaaatgtttttaaaaaaataataaaattaattttgttatttaagcagtgtaataaatataataaatatatttattataaaaataatactataggtatgcaatttttataataaataggtgatttaaaattatatatattttaaaaattgtactagtctataaagataattttgaaaagttcaataacaagaaccacagatttgatttgttt

SEQ ID NO: 5572 - DNA, 661 bp, Homo sapiens
  misc_feature [331]..[331]: Chromosome 21, SNP identification no. = rs2829443
  misc_feature [331]..[331]: allele = t, in linkage disequilibrium with rs2250059, respectively
  misc_feature [331]..[331]: n is a, t, c or g
ttcatggtattcagtgatcctaggattacatgatacaaatccgctcaattactcttctaaactcaacttaaagacaaacatttacaatgataatataataaaatgtctggattcatttaatttattaaagagacatgcaaaaacctgacataatatactatcaaatttggttcaaatatatattaaaaggataatccatggtgatgagaaggatttgctataagaatgtaaaaatgacttagtgttagaaaatctggaaataccgtgatacattaagtgtggcggttaggagttaaaatgaaagtgacagctcaattctgatgctagtgantagaaatccaaattgtcaggcaatcagcagtaactccagactctgcttacctatagtgctagagacctaaatattgtcaggattgccttcatatgtttgagttgttgcaggaataagtttatagatttcagttatttatgccagtaaagaaagcagttgctgacactgaaacacagatgctccttgacttatgatagggtcacatccagataaacccactgtaagctgaaaatttcctaagtcaaaaatacgcttaataacccaataaattcaacgcgaagttgaaaaatcattaacaaaccattacaagttggagattatctgcttacc

SEQ ID NO: 5573 - DNA, 661 bp, Homo sapiens
  misc_feature [331]..[331]: Chromosome 21, SNP identification no. = rs2226392
  misc_feature [331]..[331]: allele = c, in linkage disequilibrium with rs2250059, respectively
  misc_feature [331]..[331]: n is a, t, c or g
atcttttatttttatgtcagcctttttataacaaagataagtgatgtacagaaaagtgcacacatttacgtgtacaacttgatgatttcttacaaaaaatgcacgtaactatttcccagattattaaaatattaatagcaactgtctttttccagtgctataacagaatatcacaggttgggtaatttataaacaacagaagtgtgtttctcaccgttctgaagactgggaagtccaagatcaaggcatcggctttccagctggtgaaggtcttcttgcttcattctcacatggcagaaagtagagaggcaagaaggtctaaacggctccngcacactcattttataaagatattaattccattcaacaggacagcgctctcatggtctaatctcttccccaaatatcccacctcttaagactaccataatgaggattacattccgatgtgaattttgagaaggacacaaacatctaaaccatagcagcaaccaagaagctttgtttatgccttccccatactaatcaaaaaaaccaaaaacaataaaaaaaccaaacccacaacttctaaatttccaggatcaaaaaaacaaatccacaaacttctaaatttattctaacaatatagattagttagtatctggctcatttaaatcaaagt

SEQ ID NO: 5574 - DNA, 661 bp, Homo sapiens
  misc_feature [331]..[331]: Chromosome 21, SNP identification no. = rs2154618
  misc_feature [331]..[331]: allele = c, in linkage disequilibrium with rs2250059, respectively
  misc_feature [331]..[331]: n is a, t, c or g
ttgtatttttcatagagacaaggtttcaccatgttggccaggctggtctcaaactcctgacctcaggtgatcggctcacctcagcctcccaaagtactgtggattacaggcatgagccaacacacccggcccgattgaagagatattatgattgaggtagaaaatgtttgtatcatcaaaaaagacatgcaccatatacgtgtgcagatgattatgatgagaagaatgtggggtctattaccagttatatatgaattcaagggtatcataagaactctgaactaccaagtgtggttaaaaaaaagagaaacaactggtctattgcctgccnatgatataagcagagtctctcctgtagtcaaggagaaatcatgattaagatttgcagctctatggaatcagaatcaaggcaagggcagcttttacactctgatggaagactaattcatgtctgaagtttgtggcatagttaattttttactgctcttgctagggtgaatgatatgatactgtaagtcttctgcacatttatcacatggaatctttcctttagaagtgtaaaaaacatacagaattcaatacttgaacatacatattaaaatatataaatacacattaaaatatgtaaatacatgtattttttaatattcatactaaaaat

SEQ ID NO: 5575 - DNA, 661 bp, Homo sapiens
  misc_feature [331]..[331]: Chromosome 21, SNP identification no. = rs2829447
  misc_feature [331]..[331]: allele = t, in linkage disequilibrium with rs2250059, respectively
  misc_feature [331]..[331]: n is a, t, c or g
tctccctctttgggagtttgaaatattttttaattcacaagaaaaccaattaattgttaaaatctagttgttgaatttccactagttcctcctccaggtatttagcaggacacttaaaattagtatgagtttttcttccacagtggacactagttatgcaaaaaagaaattgcatattagataaatgttgtttagccttgatgagtggatgggtacatatatttagtcatatatgttggctaacactatgtaagggaagagatgtgatattggagattgtgtatttcttcgaaggctgtaactggataaacaaaggggtcagaggaaaacnggtgtaagaaaaaagcattaaaaagaatgacgattaagcaggtttaggaggaaagcagatccctgtctatgactaaaggaggagagagaagccagcatattggcaagtcttctgtccttcagaacacctacaccttatttgtttggagtagtagtgttcagcaatatttattttcaagattgtaggtctgtgtattaatctgtttttatgttgctaataaagacatacctgagactggataatttataaaggaaagagatttaagggactcacagttccacatggctggtgaagcctcacagtcatagcagaaggcaaaggaggagcaaa

SEQ ID NO: 5576 - DNA, 661 bp, Homo sapiens
  misc_feature [331]..[331]: Chromosome 21, SNP identification no. = rs2154619
  misc_feature [331]..[331]: allele = a, in linkage disequilibrium with rs2250059, respectively
  misc_feature [331]..[331]: n is a, t, c or g
gtggaaagaacagactacggactgaatcagtaaatcattaaatggatactttaagaaaacaaattcattatttttgtttttatattacccagattttgacaaaatatatgcctttttcatatcatgatcattttaatgaagagttttctctcacacaaacacttactaatgaatataacaggatctttgtttctgctgaattcagacaaaaattgtacattttcaaccaaatttcctgaaagaaatgtgaaaacatttaggcaacagaagttgcctgacattgatgcctcactcatttgtgaaatgtcttattatttagtctatcaatcanggccatagattttattggatttagctacctaatgtctgcacctcatttcattttggtaatttatttatttatttttaaatgggtaaataaaaattgtatatatttatcaggtacaacatgttttgaaatatgcatacattgtggaatccctaaatcaaactaattgacatatatattttctcacataccattttgtgggaacagttaaaatctattctttcagcagttttcaagaatatattgttattagctataattcactatatattatctctggaacttgtttctcttgcctaacccaaattttttattatttgattaacatcctcc

SEQ ID NO: 5577 - DNA, 661 bp, Homo sapiens
  misc_feature [331]..[331]: Chromosome 21, SNP identification no. = rs2829448
  misc_feature [331]..[331]: allele = a, in linkage disequilibrium with rs2250059, respectively
  misc_feature [331]..[331]: n is a, t, c or g
agaactcatctgaatgattatgatttggcattcacatagaaaagtggttctcaaagtttagtgcctatcaaaatcacctgaagagcctcttaaaaaatggagtactgagttcaaaaatagagtgctgagtcctacttccagaattactgattcaatgggtctataaggggccaagttgttgtgtttctagcaggtttccaggtaatggtaaagacgctattctcggcatcactttaagaatcattaatcatcgctactattaaagaatcgatcatattgcaacacccggaataataaggaatattaaacattcccccattttcagagcaancctagctttatataatcaattagggcttacccattctttttgccaacttctagtaatttaccaactctgtctgttaagtataaattaagctgctgaccgaagttcttattatatttcctcaattgtgtatgagaaatgaaatattgaatgaaatcatcacttgaccagagataaatccttacaatatttttagaatgctaaatcgtattagtatctccattaaagaaattagtacaaattaaaggagatcaggaaactctgtgggacaggttttgtgaatcaattaggtaggctgattatcaaattaatacttccaattattcttgaaag

SEQ ID NO: 5578 - DNA, 661 bp, Homo sapiens
  misc_feature [331]..[331]: Chromosome 21, SNP identification no. = rs2829451
  misc_feature [331]..[331]: allele = g, in linkage disequilibrium with rs2250059, respectively
  misc_feature [331]..[331]: n is a, t, c or g
ctaattttttgtatttttagtagagacagaacttcaccatgttggccaggctggtctcgaacttccagcctcaggtgatccacccacctcggcctcccaaagttatgattacaggcatgagccactgtgcctggcctcaattcactctcttaaccagaaaaatcagtcaaatattagattattccacagttaaattataattaaaataatctgagcaacttaatcatcaacattcttttatttcttaatatatatattttaaatttcctaactaaaatgtattgatttagtattttttaaaaaagtgtttttagtattcatattttgtacnagtgcatggcacatacgtaaatttaagaaatattaaacttattaagataacaagaatttcaagtacttattttttatgtttccaacaccacttctttttttattttttattttaagctgtttatcatgttagggctaatgagcatgcagtataatatgcttacatattatttatgtaattctagaattacctattttgatgacaatgctaaattcttatgcctcttttttttaattactactgatagcacagttagattttctactctcaattttataaaagtggaaaaatataatattcatttatattttaggtaaaaatttgaaaatc

SEQ ID NO: 5579 - DNA, 661 bp, Homo sapiens
  misc_feature [331]..[331]: Chromosome 21, SNP identification no. = rs11087936
  misc_feature [331]..[331]: allele = a, in linkage disequilibrium with rs2250059, respectively
  misc_feature [331]..[331]: n is a, t, c or g
attccaaaggtagcccaaaatctgaagatgatacatccagcagggggctgtcttagtccatttgagctgctgtaacaaaatgccttagactgggtcatttgtaaacagcagaaatgtattgttcacattctggtggctggaaagtgtaagatcaagttgccagcagacacagtgtctgttgagggcttgctctctccttcacagttggcaccatcttgctgcatcctcacacggtggaagggacaaacagggtttctcaagcatcttttacaagaccactaattccagtcatgccctcatcacctcctaaagcctccacctcttaacactntcacaatggctattacatttcaacataagaatctgtggggcacaccaacattcaaaccttaacagtgtccatggcagtggatagataggtaacttggaggggaaggaaagataaatgataacaagacagactgaggcagtagagtgttagatagttaagctctgcagaggtggaattcaaagtgattaatgacaggcattcagggaaaggggaacaaagtctttagtgaattagatgaagttaatagaagttaaaaaatagagtctggacttttaaatataattgttgagctttaaaagcaatccagaagttgaagctataaacaaagct

SEQ ID NO: 5580 - DNA, 661 bp, Homo sapiens
  misc_feature [331]..[331]: Chromosome 21, SNP identification no. = rs2250059
  misc_feature [331]..[331]: allele = c, g
  misc_feature [331]..[331]: n is a, t, c or g
aggataagaaaatcttaaagtgcaaactctaaacacaatgcataaataaagttcgatatatttaaaatatttttaattttctttgagttccctcctaaatactggctatatttctttgggttccttcctaaatgtgagtatcagctaacattataaaacaaaacatgtaattaaaaatttggtttcattgctaattatccattcctagaattctaggctgaaagacagtgcttagttttaatattcgagtaaggtatttctaaaaaacattatgcatctggaacagtggtttctaaagtccagggttatttccacagacttacattcttancagagaagtttagttatttattgacatggtaaattattgagctctgaatttttgtttcctcttctctgtggaggtagatgaagttagatgaagcaaaagatgatttctaccactctgtattctttggattccagtgatgtaacttaactcaaaaacttataaaagcaaatgaagtccattgtacaaatgtgcaatggaaatattaagactttggttgaaagtttgattaaaataaaactgacatcatataattctaacagtgctatcgaagccatgcatctgatagcattgctgctttaattcataatttataagaatgaggaagagctg

SEQ ID NO: 5581 - DNA, 661 bp, Homo sapiens
  misc_feature [331]..[331]: Chromosome 21, SNP identification no. = rs2829454
  misc_feature [331]..[331]: allele = g, in linkage disequilibrium with rs2250059, respectively
  misc_feature [331]..[331]: n is a, t, c or g
tgatttcagcatttggcatcagaagaaaacagcaggcctgagaagcttatacttacaatattgaaaaagaaaagtgaagaagaaattttagaagcagaatatggggaatgtaaagcccctttttcactgcatcatatgcagactatcttaaatttattaataatatattaacagataaagcctttattatttttagatttcatgttctatctaaattcttagtgggctttgcttctttaggatccaggtgataatatttgtcatgcactctttcatagctacaaattatgtaatattttcttagcacccactgaagacaaactttctaccntttctcagtgccattaaagcacgttgtacacatatgtataccttaaatttttaaaatgccagcagcccatgaaaatacagcccagttttagtctgatataatttggagacttctttttggctattggacttgacaactatggataaaatccaatttgtcaaaatgcacatgataaattcttaccaagataacacactcttttgtagggtaaaaagaaactaatttgtgcaattgtataaattgatatttttaaaggttatcacccagtgaccttatcattagccttattattgccaacttgtcctaaaatgttaactaggactttggtct

SEQ ID NO: 5582 - DNA, 661 bp, Homo sapiens
  misc_feature [331]..[331]: Chromosome 21, SNP identification no. = rs2829456
  misc_feature [331]..[331]: allele = c, in linkage disequilibrium with rs2250059, respectively
  misc_feature [331]..[331]: n is a, t, c or g
aatgccagcagcccatgaaaatacagcccagttttagtctgatataatttggagacttctttttggctattggacttgacaactatggataaaatccaatttgtcaaaatgcacatgataaattcttaccaagataacacactcttttgtagggtaaaaagaaactaatttgtgcaattgtataaattgatatttttaaaggttatcacccagtgaccttatcattagccttattattgccaacttgtcctaaaatgttaactaggactttggtctctctggcagagcaagaaactccatgcggtagaatcgtcgtggttcttcatggccnggctaggtgtgtggatcttttccaaaaggaaagctaggagataattaatggctgggtgccataatctatagtatatgagttatacgaattgcctagaaatcctaaataaacccaggttttacacattttataaaaagataaagctttacagatgtatcatgttttatatgtaatgtataagacgttataaactgtacgaatttaatttttaatacagcttaggttttgtttctaaacccagtgctatagactgcatggtttcatcccaccaaaattcatatgttgaaatcctaacctccaatgtgatggtgttaggaggtgcagcccttg

SEQ ID NO: 5583 - DNA, 661 bp, Homo sapiens
  misc_feature [331]..[331]: Chromosome 21, SNP identification no. = rs9984205
  misc_feature [331]..[331]: allele = g, in linkage disequilibrium with rs2250059, respectively
  misc_feature [331]..[331]: n is a, t, c or g
cctttgtagggacatggatgaaattggaaatcatcattgtcagtaaactatcgcaagaacaaaaaaccaaacaccgcatattctcactcataggtgggaattgaacaatgagatcacatggacacagaaaggggaatatcacactctgggcactgttgtggggtggggggaggggggagggatagcatcgggagatatacctaatgctagatgacgagttagtgggtgcagcgcaccaccatggcacatgtatacatatgtaactaacctgcacaatgtgcacatgtaccctaaaacttaaagtatatataaaaaaaaaaaaagtcatgcnttagagaaaaaagaaagctgtttctgttgtcaaaagtaaatctcttattattataatttgttggtactgttgaattgtggcaagaaaacaaatagcacagaaaatagtaataccttatagcatggaaaatatttcctttttaaaaattagtatacttatactgtgatgaaattgttttccatctctacatggaaccacatatgtaaagttaggcaatcaaatattaagtaaaactttttcattaatattttattaggaggtgcatgaagcaaggttaagaagatgggggatgaagaatgatgaatggtaacatgctaaattctgttaaaa

SEQ ID NO: 5584 - DNA, 661 bp, Homo sapiens
  misc_feature [331]..[331]: Chromosome 21, SNP identification no. = rs2829464
  misc_feature [331]..[331]: allele = a, in linkage disequilibrium with rs2250059, respectively
  misc_feature [331]..[331]: n is a, t, c or g
agaggtcaaatataggttatggaaccatgcaatttcagaaggggcttgattcatagtgtctatgtcataaggatctaattattcaatgtaggggactaatctacaaaacttcacataaagcaataattcccaatgcagatttagtggctgtttatttatgtctgtgttgagattctgaacttctatcacagtttgtcttactctgcagcttttttggtaaccaggcttctttgtcttaactctgattttgtaatttgacttaattttcctataggatcccatcagcatttaatttaccagttttcccttggttttcaacttcaataagatncatctttaaaaaagtaatttctttcagtctggaacattagcataggataaagaaaaaaactgaaaatgtcttatgtcctcaaaatcataacatgtggtaattttaatgatgttaaatatatattatcatacattggaagggctttaattcatgaaaattggcaggttgaccacaattatgtagttaaattctatttaaaataaaagggtcatatatgatacctcaaccacttttatcagttccctactctgttctcctttccccactcagttcaccaagcaaaggtaatctgaagcaataaagcaacactacagtcatcctacatactcc

SEQ ID NO: 5585 - DNA, 661 bp, Homo sapiens
  misc_feature [331]..[331]: Chromosome 21, SNP identification no. = rs12627329
  misc_feature [331]..[331]: allele = c, in linkage disequilibrium with rs2250059, respectively
  misc_feature [331]..[331]: n is a, t, c or g
ggaggtgtttttatcttaccagtctatctaagacacactcaatcatagtcgctattgaatttggcatttcaattcttcactgtcacttctcattaattattggttctaatactgtctttgatgacttcttccttgtcattttacttcatgaactcattatttctaattgctattttatgccactttttggttcatcagtttttaatgttccacttaattggctccgttgtttaaatgatgtgaggaaaaatggggttaaatttatcatttatctgatacattctggtatgagagagcttaatttggttgttccattttctagatagaaaangtaaggaaatattttctgcattctattcagattgttattgctgaagtcatcttatactatgaccttttaaaatattttcaaaggctttagaaaaaaattataggtacactgacatttgcttattgtgaaatgttatatcatgttcctttttatgttgtaatttgtagtattccacacgacagatttctctgttaatcgtacatcaggtctcacactcttataatttagccaagaattaaaaaaagacaagtcaaagaattggttttaacatgccaaaatatgtcagggatatatctgtggatttaaagttaaagaaaaattactagaaaa

SEQ ID NO: 5586 - DNA, 661 bp, Homo sapiens
  misc_feature [331]..[331]: Chromosome 21, SNP identification no. = rs2829465
  misc_feature [331]..[331]: allele = a, in linkage disequilibrium with rs2250059, respectively
  misc_feature [331]..[331]: n is a, t, c or g
tggctttgaatgcaaatttatcttttggatcaatttaattttttatttatttattttacctttgtttattccttctgggacagtattcttttgtgtgtgtgtagatctgattttgtgttctagattatttttcttctcactgaagaatttattttaactttttttttaatagtatgggtcttctgttggcaataaatttccttggttttaggttgtcagagaaaagatttcttcatttttgaatagtaattttcctagatatagtattctagtttggtaaattttttccttcatcgctttaaaaatgttgctccaatttttcttgttgccntggtcttttaagagaaggctgatgtgtgtgtgtgcttgtgtgtgtgtgtatatatatatttatggtggtgagtaaattctttcagaaggtttatttgaaggcttctatatatatatcacatatagtatataatatatatatcagccttcaaaatacatatatataaagtatatatataactgttccttatttctctgatatatatggtatatatcatatatatatcagccatttatatatatataaatatatatttttattaactttccttatttctctatagtaaggtgtattgttttctacttgctgctttcaagattttgtctttgt

SEQ ID NO: 5587 - DNA, 661 bp, Homo sapiens
  misc_feature [331]..[331]: Chromosome 21, SNP identification no. = rs2409056
  misc_feature [331]..[331]: allele = g, in linkage disequilibrium with rs2250059, respectively
  misc_feature [331]..[331]: n is a, t, c or g
aattgatatttttatattttataaatattttcttctaggaagtggtcaagtatcaggggagtcatttgatcctttttgtctttttggaagagttttaggcagaattggcacagtgctcagtgtagggctaattattctgcactattgaggcaagaccattctgtgacctctacccaacgcaacatgattcatgaggttgtctgggatgcttggtggaaacatcactattcccagccctcttaccattaatcctttaggtgatttttttccctagccttggattgttttcttacacttgagtgctaatcagtattctgctgagcacttgacngggaaactctacaggttcccaaatttctctttaaactttgcagttctataattaccagtactcagccctacaaatgttaggtcctctgttcctctccgactgtcagttctgttttctcaattcagagagaactctggtctccaactggattaacttttcttcaccgtggcctcagaactgtcataaagcagtaaccatggacaaccataacgctcccctcatttgcttcccatttctgaagaatcactactctttgttgctaaatttttagtgccttaaaaattattgttttatattattttagttttttgttgttgttattttagtcag

SEQ ID NO: 5588 - DNA, 661 bp, Homo sapiens
  misc_feature [331]..[331]: Chromosome 21, SNP identification no. = rs2829466
  misc_feature [331]..[331]: allele = t, in linkage disequilibrium with rs2250059, respectively
  misc_feature [331]..[331]: n is a, t, c or g
caaccataacgctcccctcatttgcttcccatttctgaagaatcactactctttgttgctaaatttttagtgccttaaaaattattgttttatattattttagttttttgttgttgttattttagtcaggagggtaaatcaagtcctcttttcttcatcctgactgaaagcaaagtctctgatagtagtattatcaaatacattaaattttgaaataattttgtatactttattaaaactttgagatttaatcactttgagattattacaatgtaatatatatgccctaagaactgtggggaaacttcaagtaatttaatatagacaattntgttatctgaaaattctgaaaccaaacatttaagtgagaagcaagaagaaaactcaatacagcacaaagtagagtataataagttttgttttgttcttcactttagctttttggatatacgtgctctaaaataaagtgttttgtttttctattccaattttagtataatgcttaatgcctgagaaaaaactggatagattacaagcaaaatagaaccttagcttggagaaggaaatcttgataaacacttttattatttttatttttctgagacaaacatcttaactcttctttaaaaattggttagtggtacttaactgatgaagaggg

SEQ ID NO: 5589 - DNA, 661 bp, Homo sapiens
  misc_feature [331]..[331]: Chromosome 21, SNP identification no. = rs17000583
  misc_feature [331]..[331]: allele = g, in linkage disequilibrium with rs2250059, respectively
  misc_feature [331]..[331]: n is a, t, c or g
cttgctgtagggacacagatccacaaatattagtgactttgtgacaatcactaatatctcttcaggcacagagttttgaagttctttttttcaactagagagttatgcaaatattatgtatactcactgcacaattaaacctaattattttaaaatgcaaaatgacggacattgcacatcatctcaccatatttttccaaataggatagcataggtgtaccgtcaactttatgacaagaatatggcagagctgtgcatcctttgggagagatttcctacaattacttaaattccttacactttaactcctcggaatttctgtagaggaagnaaagtgaaatctgtaactattatgccttctactctgttatatgctcccatctctgtgaatcttgatttaagctgagtgcatcgttaatctttaatataacccgagaacaatagtcaaatagaataatgagtggtattgaagaaatatatagaacagcatgcccagaaatgcattcaaccactccatatcttgcattattagacacacccactgacttgcacagatccagaatttttaactctttgttgaaagcaagggtaggcaaaacttattcataacagaccagataatataatatgttcagctttgtgggccatatggtctctgtga

SEQ ID NO: 5590 - DNA, 661 bp, Homo sapiens
  DSCAM
  misc_feature [331]..[331]: Chromosome 21, SNP identification no. = rs2837479
  misc_feature [331]..[331]: allele = t, in linkage disequilibrium with rs1000371, respectively
  misc_feature [331]..[331]: n is a, t, c or g
tcattggaaacccagtgactctgcatcatgacccttccataatccacaccttctattctctgatggtctgtcaaattcagtggtgtttcaatgagcacccactaattgaagctgcatgttctatgcacagatttatagtgaaaataatgaagggggcagccatcccaaactcggtcacaaggcactaagtgactcatgacctgcagggggcagctgctaatggggaagttggtctgtagcaagggttagctgtgaatgtcatgtgtcacgtggctgatccgtgtcaaagagacacacttcgggtccattaacagctcatctcattaactcngactgtgtcacttattctcttgactgctcctttgttgtgggggctgctggtgctaggggtggttggggaagccatgaagactgcgctgaatggtgtggtcttggcttcatggctattctctgaggtcgagtgtattaaagtggtatgataacgctttatgcactttcacatgcaacacatgcaaataaactgagtagtttggggttggagcaatgagatttcccaacattaggtagggacactatgccagtggcagcaatcccttcctcactaagctttgcagtagatacagcagaaatctaaaactcaaattcccatggtggccagact

SEQ ID NO: 5591 - DNA, 661 bp, Homo sapiens
  DSCAM
  misc_feature [331]..[331]: Chromosome 21, SNP identification no. = rs2837480
  misc_feature [331]..[331]: allele = c, in linkage disequilibrium with rs1000371, respectively
  misc_feature [331]..[331]: n is a, t, c or g
tccagctcattgctgccaagcaggaactcaagaggaactcaaaatttagattttcagctgaaatttccagattttaaaaattaacatcgaatttaaaagtttcgcacaacactgagccgactcacatccacaggcctggtctgtcgtgggctgcagcttatggcctgggacatgccctattccatcaggatgcggggagggcacctcaagctccagatgcagccatttcatgggtggtcactggagctctgatgggggctgtattctttccccatcttctttcctctcagccttcctgtcctatctttcacctttctctacttttctgcangaagtccttgtcttagtcttttggggctgctataacaaagtactctaaactgcatgacttatacaccacagaagtttatttatttctgtttctttttttgacaaggagtctcactctgttgcccaggctggagtgcagtggcacgaccttggctcactgcaacctccgcctccagggttcaagcgattctcctgtctcagcctcccaagtagctgggattacaggcatgtgccacaatgcatggctaatttttttttgtatttttagtagagacggagtttagccatgtcggccaggctggtctcgaactcctgacctcaagtgatcccc

SEQ ID NO: 5592 - DNA, 661 bp, Homo sapiens
  DSCAM
  misc_feature [331]..[331]: Chromosome 21, SNP identification no. = rs7278294
  misc_feature [331]..[331]: allele = g, in linkage disequilibrium with rs1000371, respectively
  misc_feature [331]..[331]: n is a, t, c or g
cctcacttcctaaaggccccacttcttaatattattgcattaggaattaggtttcaggatattcatttgaaagggaaggcatgaacattcagaccagggcacccttcagaatttcactgtgggtttaatccagcatatattttctcaacacacacatacacacacacacacacacacacacacacgcacacacacacacacgcacacacacatactctgctcattgtgacacccattctaaaggcaatactgtgggtaatgtttataaacgttcatctcatactttcatctcccttatgccagacacacacaagggacagaattgtaagcncatatgccccctgatgtggagggggccacagcccctccacatcaggtggtatatcatcatggacagcagggtccatgaagacatgatgatacacctcaaaggctactgtcagcaaaatccctcctctgtcctgagctgagtagtccctaactacacatgggagatggaaaaaggcattgcaccagggaggaaggcattcttgaacttgacttttcaaggaagggcacagaaaaggagacatggaacttgtagtgccttcaagacaggggaagaagcacaacaataggggtctgggagcatgcaaaggcaggtgagtgctgggcattgggc

SEQ ID NO: 5593 - DNA, 661 bp, Homo sapiens
  DSCAM
  misc_feature [331]..[331]: Chromosome 21, SNP identification no. = rs11908938
  misc_feature [331]..[331]: allele = c, in linkage disequilibrium with rs1000371, respectively
  misc_feature [331]..[331]: n is a, t, c or g
catcaggtggtatatcatcatggacagcagggtccatgaagacatgatgatacacctcaaaggctactgtcagcaaaatccctcctctgtcctgagctgagtagtccctaactacacatgggagatggaaaaaggcattgcaccagggaggaaggcattcttgaacttgacttttcaaggaagggcacagaaaaggagacatggaacttgtagtgccttcaagacaggggaagaagcacaacaataggggtctgggagcatgcaaaggcaggtgagtgctgggcattgggctctggggagtcactaagtgtcattgcaaagtagtagcatnggggggcatcctcgtgtgcccaagacttgggtactagattacagtaaaagtgagtgggctgacagcttccggaggctcccatatgaggaataagggaacagtgggacaaggtcacctcaagacagctacagctcctaaaaagatgtgcctttgggtttacctgctgggaaggggcagcagtgtctacagcccctgctcaatactctaatgaggatgcctttggccagagcaccccattctaggtaagtcacacatgggaaattgactttttaatttcagtcatgcaaacctatgaaccaagacaaagacaagttatctgctgtagctttt

SEQ ID NO: 5594 - DNA, 661 bp, Homo sapiens
  DSCAM
  misc_feature [331]..[331]: Chromosome 21, SNP identification no. = rs8130311
  misc_feature [331]..[331]: allele = g, in linkage disequilibrium with rs1000371, respectively
  misc_feature [331]..[331]: n is a, t, c or g
cagcctaaagatcttctgtcactcactcttgaaaacaattttcaagaactgacatcttccagcattgaaaaatgggcattcctctgcagttcaggaagagttgtacattttaacctattctcttgaagacaacactgattacagatatcagaagggtgaaaatgttgcatttgattgatccagccatctgacttcttaggatttaatctaagaaaatgatcttggagatagcaaaagacataccaccaggatgttcattgtagtggtgtttatactaatgaaaactcgaaaataattgacccgtttggcaatatgagatttgttaaacacntagtgagagatatcattacaaattgtagaaaagtacttaagagatacataagctccatttatatttgggatgctgttaatgagggtagcagagatgaggtggtgggaaggaagccaagatcaacctctcttgaaagttgcaacaaacctccggtcttctgttagccatctgggtgtggcaatcaccttaatcttggtgatggagaaacagggacttgagactaagctgccatcttccctgcagtagggagtggctgattgctctgatggtgggcaggaaaagaagaggtaggtttgggagctggacaccctttccctacaataaatgggc

SEQ ID NO: 5595 - DNA, 661 bp, Homo sapiens
  DSCAM
  misc_feature [331]..[331]: Chromosome 21, SNP identification no. = rs3804022
  misc_feature [331]..[331]: allele = c, in linkage disequilibrium with rs1000371, respectively
  misc_feature [331]..[331]: n is a, t, c or g
cccacgtacctgcctcgtccgccgtgatggtgagctcgttgctgggctcgctcttgccaatccggttcttggcgtacatgcggatgctgtaggtggaggaagggtggatatcaatgatggtggccgagttcagctgaggggaaacatctttggttctctgagcagaatcccaggagtcttttgggttttgtttttcaaaaaagaagagatagagacgtgagtttttttcctctgcctttgaaagttcacaagtaggaattaaaaaccaaaaaaaaaaaaaaaaaaaaaaaaagacggaaagaaagaaaaattacactcaaagtgatttctnaatgcaatgttcccagctttctggcagagttggccatcagaggggatgtgacatcccacacacattattcacgctgcgagggacatggggcaacaagccagctgagttcagggaggggtgatggaggaagcacagatcagccgactgggggagatctcagaaggcaaattccagtggtggaagctcaggttagtggaatggacgatggccactgtaagcactcattgtataggacagtacaatgaactatggtttggatagtacccctgggcccccccaaaatccctggcatttgaaaaccagcaaaacttcaagccatatcagatcctt

SEQ ID NO: 5596 - DNA, 661 bp, Homo sapiens
  DSCAM
  misc_feature [331]..[331]: Chromosome 21, SNP identification no. = rs1000371
  misc_feature [331]..[331]: allele = c, t
  misc_feature [331]..[331]: n is a, t, c or g
ggggggcaggagatgatgacaggagatacaataacaaggacttggggtgttcagtgtttcctggaaaagagtaaaccaaggaaagtcatctgttgtcaaatcctgggaggactgtcatttggccaaagggttaagaggtgggaggagagacactggatccaggaaggtctattttggtgcaataaatgtaagaacttgtagcagtcacagctggccaaaggcagagctgtgctccctgggttagtgagtttctgtttctcggattgttcaagcatagagtgaatggtcacttgcagaagttctttctgttacgaatgtgaagtactttaanacattggttatatgctgctttctttgaaaattaatgaaaaggaaaggaaaacttttggggggataatttcaccgttgcctaaaacagatgttgagagtcaacaatttgactaatggttattatgagtctcgtatacatgtcaggcactatgaggggcacagggacatagcataaggtttgtcagagacaattccagccctcagggctcactatggcccatagggggacaactgttcagtggggtgcagatagtaaattaatagtcacaagcccaccaagtgttccaagacatgctatgaatagtgaaggggaataggtagtcagggaagg

SEQ ID NO: 5597 - DNA, 661 bp, Homo sapiens
  DSCAM
  misc_feature [331]..[331]: Chromosome 21, SNP identification no. = rs1000373
  misc_feature [331]..[331]: allele = g, in linkage disequilibrium with rs1000371, respectively
  misc_feature [331]..[331]: n is a, t, c or g
ctcactatctccctactcttacccaggagtttcccaaaggcagggactctggttctctgtgtcctgggatccccagcacccagcacaatgtcaagtgaagagcatactgtaaatgtttattgcattaatttacatgcaattgaaatctaagaatcattattatcaacagcatctttaaatgtataaattgatcatggtttatataaccaaagcaggaaagctccttgtctataaagctgagtacaggcgggattgagggatactcttttccatccttcatgccctacttcaaccagagacagggccagtggtgtggctaagatgtttatgnagccctggagcaagtcattttaaggggcagcatgggtcccaggagaaaagcccacaggacaagcagatccaagtccatgaccaaggtctctaccaggaccctacagaacttcaattactttcagtttggaagccctgggaggaaggagctgtgctgagagtagatagcacctgtactcactgctgtacgagttgtgttagtcagatttttcatgtattagtttcttcctccagaaatttttggtgtataaaaattacaaccataatttaagtgagtgtagttttagactgagtacatagaaaactgatccttcaagtattaataacagcc

SEQ ID NO: 5598 - DNA, 661 bp, Homo sapiens
  DSCAM
  misc_feature [331]..[331]: Chromosome 21, SNP identification no. = rs2898402
  misc_feature [331]..[331]: allele = t, in linkage disequilibrium with rs1000371, respectively
  misc_feature [331]..[331]: n is a, t, c or g
ggtaagagtagggagatagtgaggacacttagatgctgagtaagtagtttaacacagagggttttagaggcattttactcctaagtattttcctgcatgctggagcaatctacaagctaccacctattagatgttgagtatgctccagacaacgaggaaggcgttttcaatgtcttcccttcttagagttcaccaatttccattgagtgtctccacatgttgggtgcggtgctgggtgttggagaaatgagctgggtgaaaatagacctactaggtgcagggagcccccaaggagcctctagcgtggtggaggtgaaatgcattaatcagnatatttgtcagtaatcatagagatacatatatagtgacccataatgccacctgcccagattgaaagggagaaggagctgggtgagcacctgagaattgagatctatggagggggtagtaactgggtggctcagggaagggaggactccaggcagagggcagctggtggcctttgtggtctccttgccagtcctttgaggtggatgcagcagtgcccacttcacaggtgagatgcgcaagcgagggtgcagagctggtgcaacgcaggcccagcagcgaatcccacacaggctgggtcccaaatcactgagcccaggcctgccaccagcat

SEQ ID NO: 5599 - DNA, 661 bp, Homo sapiens
  DSCAM
  misc_feature [331]..[331]: Chromosome 21, SNP identification no. = rs726105
  misc_feature [331]..[331]: allele = c, in linkage disequilibrium with rs1000371, respectively
  misc_feature [331]..[331]: n is a, t, c or g
caggcactctaggaagcgaatgcaatattaagtgtacaactgaattgcacacttaaaacaggtgaattttatggtatggatattataccacaataaagctattaataaaaataaacatttttatttattttataggctaggggaagggggggatcagaaccaaaggctggggacagtacagccagttttgctgcatctcagaaatgccagaaaaggaatttcacaacagttgtgagcaactgtccttgatatgcaggactcttggcacctctttcttgagtcaccaatttgcctactttccatcttattacacggtcagtgctgtggggcncatctctgccacatggctgctgactctagagaaactcccaaatgtaggttcttctgtgggtgttcaggctacggaactggtagtattttgacgtttcattatatgtctcaaacctctctagtaagccatgggaaaagacatgacccagtatgtgccagtcttagaagaagccacagtgtttctatggtcaagtaccttggaagtcttacgaggcaagcaatcaagtacgtagtctgagcttgacctcagaaatgggggaagggagcttcttcctgtgattggggaaatgagataaaaagcaaataaaaaggttgttatgttttgatgaat

SEQ ID NO: 5600 - DNA, 661 bp, Homo sapiens
  DSCAM
  misc_feature [331]..[331]: Chromosome 21, SNP identification no. = rs726103
  misc_feature [331]..[331]: allele = t, in linkage disequilibrium with rs1000371, respectively
  misc_feature [331]..[331]: n is a, t, c or g
agttttgccgccacaagccaaggaatgcctggggccaccagaagctggaagaggcaaggaagggtcttcctctagagctcttagagggagcatggctctgttgtcgacttgattttggaattccagcctccagaactgtgagagaagaaatttctgttattataagccacatagattctagtaatttgttacaggcactctaggaagcgaatgcaatattaagtgtacaactgaattgcacacttaaaacaggtgaattttatggtatggatattataccacaataaagctattaataaaaataaacatttttatttattttataggctangggaagggggggatcagaaccaaaggctggggacagtacagccagttttgctgcatctcagaaatgccagaaaaggaatttcacaacagttgtgagcaactgtccttgatatgcaggactcttggcacctctttcttgagtcaccaatttgcctactttccatcttattacacggtcagtgctgtggggcacatctctgccacatggctgctgactctagagaaactcccaaatgtaggttcttctgtgggtgttcaggctacggaactggtagtattttgacgtttcattatatgtctcaaacctctctagtaagccatgggaaaagac

SEQ ID NO: 5601 - DNA, 661 bp, Homo sapiens
  DSCAM
  misc_feature [331]..[331]: Chromosome 21, SNP identification no. = rs2837481
  misc_feature [331]..[331]: allele = t, in linkage disequilibrium with rs1000371, respectively
  misc_feature [331]..[331]: n is a, t, c or g
ccatttgaattcaacaggggaactcaaagagtagagattgggtgcacctataaaaaggtgagctggcatgttcctcgacagctggaggcttactggctgtagaaaccccaggctcaccatggatctgccatcacagaggaactgaaggtggtggcactttctgtttggcctcaatccactaatcaagattttttctcatacgggaaagaggctaactcaagataattagagatctcaaagccaacaaaagtaacctaaattacaaaactgtgaataaataaattacaggcctatgaacaagaaaatatttactcctcattctttctctcangactggggaatgtgaatcagaaaccatgacacccacatataatttagctttgaaaggtgacccctgtccactaccatcaacccccacgccccaattcctgatgagtgtcctgattcctgcaacaccctcatccttagaataaaatatagaaactcttgttgcaaaactgaaaatcaatccatgtttaatgcctcccagtctcctgggcatctcaaggctatggtcaggatttcctattttgcagtgtttgtaaaaaggaaatgtataaaatggtaagacataaaaacagacagttttcctttgagaacttggtaagtcaccatcatcacc

SEQ ID NO: 5602 - DNA, 661 bp, Homo sapiens
  DSCAM
  misc_feature [331]..[331]: Chromosome 21, SNP identification no. = rs2837482
  misc_feature [331]..[331]: allele = t, in linkage disequilibrium with rs1000371, respectively
  misc_feature [331]..[331]: n is a, t, c or g
agtgtttgtaaaaaggaaatgtataaaatggtaagacataaaaacagacagttttcctttgagaacttggtaagtcaccatcatcacctcccaaatccagggtagtttaacactcactgactatattccaatgagagcaagccaattctgaagtaagggtttctgtcctattctaggagctccaaggctggtgttgacccagaatgtaattccctagtactttaaaaccaccaactggaagaactgttctccaaaaactgcagcattgttttgaggacttgtttgttttcttctcttttccttttttaaaaaaataatcacaagttttatngcatttgatgagagaagtaccttggccaaaccatagacctctggtttgtttatgacttgcccatcttaatctgcacacaatactcctcagttttatttagatttctactttgaaagagtgccctactaaaatgggtatttttgttctggttattaaattcagcacttagagagaaatgctctgactagcccatgttctcctatccagctcaagtattttcagccctttaaagtaatggtggaaaggaaaaaatgaatcattaccatggcttctttgcaatgctaatgtttgaaggcatgaccttttcacttgtcacagttatggatgcct

SEQ ID NO: 5603 - DNA, 661 bp, Homo sapiens
  DSCAM
  misc_feature [331]..[331]: Chromosome 21, SNP identification no. = rs2837483
  misc_feature [331]..[331]: allele = g, in linkage disequilibrium with rs1000371, respectively
  misc_feature [331]..[331]: n is a, t, c or g
tcacctcccaaatccagggtagtttaacactcactgactatattccaatgagagcaagccaattctgaagtaagggtttctgtcctattctaggagctccaaggctggtgttgacccagaatgtaattccctagtactttaaaaccaccaactggaagaactgttctccaaaaactgcagcattgttttgaggacttgtttgttttcttctcttttccttttttaaaaaaataatcacaagttttatcgcatttgatgagagaagtaccttggccaaaccatagacctctggtttgtttatgacttgcccatcttaatctgcacacaatantcctcagttttatttagatttctactttgaaagagtgccctactaaaatgggtatttttgttctggttattaaattcagcacttagagagaaatgctctgactagcccatgttctcctatccagctcaagtattttcagccctttaaagtaatggtggaaaggaaaaaatgaatcattaccatggcttctttgcaatgctaatgtttgaaggcatgaccttttcacttgtcacagttatggatgcctagagatgacaacatgtctgtacagcagccctttttgcgaggatttctgaagcataacaaatggatggggtaatttaacaggga

SEQ ID NO: 5604 - DNA, 661 bp, Homo sapiens
  DSCAM
  misc_feature [331]..[331]: Chromosome 21, SNP identification no. = rs8127634
  misc_feature [331]..[331]: allele = a, in linkage disequilibrium with rs1000371, respectively
  misc_feature [331]..[331]: n is a, t, c or g
gttgtgtgctgcgtgcctctcttgcaaaattacccattgaggaaggtgctgttttacatcatatcaatttataaatttgcttcataaactataatattatctaacagcatccttaatgctcagtaaatctgtgttcttatgatataagggagcatccctctgacctacttttttgcagcataaagatgcagtggtgtagtggagctgctgtcattggccagggagatctgattgtgcacatctctgcccagcttggcagtgcagtcatgtctctttcccatttagcttgaaattggcaatggtggtagtatttataccactgaaattggcnagtgctagaaatcacggctttctccatcctctccccctcaatagctaattgttaaacatttaccagaataatacttaggagagtgtttcactatattaataattttaaagggtgttcccatcgtacaagagatactgagaagatagtaagattaagctaagagcaataattaactttatcaatgaaagtaaacccttatttattaattaaataattaaaatatgaacagtttgtcactgtacgttttgacaagtaattcagtgataaattgatgaatatcttaattttttaaccctaggatacagagagaatgaaaaattctatcaataa

SEQ ID NO: 5605 - DNA, 661 bp, Homo sapiens
  DSCAM
  misc_feature [331]..[331]: Chromosome 21, SNP identification no. = rs8128592
  misc_feature [331]..[331]: allele = c, in linkage disequilibrium with rs1000371, respectively
  misc_feature [331]..[331]: n is a, t, c or g
tataaatttgcttcataaactataatattatctaacagcatccttaatgctcagtaaatctgtgttcttatgatataagggagcatccctctgacctacttttttgcagcataaagatgcagtggtgtagtggagctgctgtcattggccagggagatctgattgtgcacatctctgcccagcttggcagtgcagtcatgtctctttcccatttagcttgaaattggcaatggtggtagtatttataccactgaaattggcgagtgctagaaatcacggctttctccatcctctccccctcaatagctaattgttaaacatttaccagaanaatacttaggagagtgtttcactatattaataattttaaagggtgttcccatcgtacaagagatactgagaagatagtaagattaagctaagagcaataattaactttatcaatgaaagtaaacccttatttattaattaaataattaaaatatgaacagtttgtcactgtacgttttgacaagtaattcagtgataaattgatgaatatcttaattttttaaccctaggatacagagagaatgaaaaattctatcaataaatcactgatattaaagactggttccaaactttactctcaagtcttttaatgactctatcaataatgcaa

SEQ ID NO: 5606 - DNA, 661 bp, Homo sapiens
  DSCAM
  misc_feature [331]..[331]: Chromosome 21, SNP identification no. = rs2837485
  misc_feature [331]..[331]: allele = t, in linkage disequilibrium with rs1000371, respectively
  misc_feature [331]..[331]: n is a, t, c or g
tctgcccagcttggcagtgcagtcatgtctctttcccatttagcttgaaattggcaatggtggtagtatttataccactgaaattggcgagtgctagaaatcacggctttctccatcctctccccctcaatagctaattgttaaacatttaccagaataatacttaggagagtgtttcactatattaataattttaaagggtgttcccatcgtacaagagatactgagaagatagtaagattaagctaagagcaataattaactttatcaatgaaagtaaacccttatttattaattaaataattaaaatatgaacagtttgtcactgtangttttgacaagtaattcagtgataaattgatgaatatcttaattttttaaccctaggatacagagagaatgaaaaattctatcaataaatcactgatattaaagactggttccaaactttactctcaagtcttttaatgactctatcaataatgcaaaattaatccttatacatttttatggtttttgttcctacctggttctgctgaaaagaaaacagattgaaaagaaaacaactgaaaagaaaacaggagaaagtaccaaacagcctggataatcccgaatgagacaagattcctgtcacaagcatctggctcaatactttcatttt

SEQ ID NO: 5607 - DNA, 661 bp, Homo sapiens
  DSCAM
  misc_feature [331]..[331]: Chromosome 21, SNP identification no. = rs2837489
  misc_feature [331]..[331]: allele = a, in linkage disequilibrium with rs1000371, respectively
  misc_feature [331]..[331]: n is a, t, c or g
taaattgatgaatatcttaattttttaaccctaggatacagagagaatgaaaaattctatcaataaatcactgatattaaagactggttccaaactttactctcaagtcttttaatgactctatcaataatgcaaaattaatccttatacatttttatggtttttgttcctacctggttctgctgaaaagaaaacagattgaaaagaaaacaactgaaaagaaaacaggagaaagtaccaaacagcctggataatcccgaatgagacaagattcctgtcacaagcatctggctcaatactttcattttatagagaagaaagggtgtcaaangcccaaatacaggagtccatcaggatctgactctgatcggtcctatttgaaaaccatcatcgtcatgatcaccccaaacataggagatggccaactgtcccagggtgtccaggacttccagtgttttaacacaggaagtctgtatcctgggaagtttctcagtccctccaggcattcagagcagatatggcagaggagggtgtggagccaagaacgaggcagcataaacctggcccaatgcccaagatgggaaactgaggcaggaattacagggttcccgggtgggaggtcaaaagaaggagatgctctgggacataaacacattttaaa

SEQ ID NO: 5608 - DNA, 661 bp, Homo sapiens
  DSCAM
  misc_feature [331]..[331]: Chromosome 21, SNP identification no. = rs9978725
  misc_feature [331]..[331]: allele = a, in linkage disequilibrium with rs1000371, respectively
  misc_feature [331]..[331]: n is a, t, c or g
aagtcttttaatgactctatcaataatgcaaaattaatccttatacatttttatggtttttgttcctacctggttctgctgaaaagaaaacagattgaaaagaaaacaactgaaaagaaaacaggagaaagtaccaaacagcctggataatcccgaatgagacaagattcctgtcacaagcatctggctcaatactttcattttatagagaagaaagggtgtcaaatgcccaaatacaggagtccatcaggatctgactctgatcggtcctatttgaaaaccatcatcgtcatgatcaccccaaacataggagatggccaactgtcccagngtgtccaggacttccagtgttttaacacaggaagtctgtatcctgggaagtttctcagtccctccaggcattcagagcagatatggcagaggagggtgtggagccaagaacgaggcagcataaacctggcccaatgcccaagatgggaaactgaggcaggaattacagggttcccgggtgggaggtcaaaagaaggagatgctctgggacataaacacattttaaagctattttttcaagtcccttttaaaccagtcctcccaaatttttattatgaaaaaatttcaaacatacaggaagccaatcagccatgtatctactgcctggatt

SEQ ID NO: 5609 - DNA, 661 bp, Homo sapiens
  DSCAM
  misc_feature [331]..[331]: Chromosome 21, SNP identification no. = rs9979293
  misc_feature [331]..[331]: allele = c, in linkage disequilibrium with rs1000371, respectively
  misc_feature [331]..[331]: n is a, t, c or g
cttatacatttttatggtttttgttcctacctggttctgctgaaaagaaaacagattgaaaagaaaacaactgaaaagaaaacaggagaaagtaccaaacagcctggataatcccgaatgagacaagattcctgtcacaagcatctggctcaatactttcattttatagagaagaaagggtgtcaaatgcccaaatacaggagtccatcaggatctgactctgatcggtcctatttgaaaaccatcatcgtcatgatcaccccaaacataggagatggccaactgtcccagggtgtccaggacttccagtgttttaacacaggaagtctgnatcctgggaagtttctcagtccctccaggcattcagagcagatatggcagaggagggtgtggagccaagaacgaggcagcataaacctggcccaatgcccaagatgggaaactgaggcaggaattacagggttcccgggtgggaggtcaaaagaaggagatgctctgggacataaacacattttaaagctattttttcaagtcccttttaaaccagtcctcccaaatttttattatgaaaaaatttcaaacatacaggaagccaatcagccatgtatctactgcctggattccacagttcacactttaatgcacagtgttgaatcaaaat

SEQ ID NO: 5610 - DNA, 661 bp, Homo sapiens
  DSCAM
  misc_feature [331]..[331]: Chromosome 21, SNP identification no. = rs9981386
  misc_feature [331]..[331]: allele = t, in linkage disequilibrium with rs1000371, respectively
  misc_feature [331]..[331]: n is a, t, c or g
aaggagatgctctgggacataaacacattttaaagctattttttcaagtcccttttaaaccagtcctcccaaatttttattatgaaaaaatttcaaacatacaggaagccaatcagccatgtatctactgcctggattccacagttcacactttaatgcacagtgttgaatcaaaatgtgttttctttgttatcaagatttactgaatacattttttttattattctattttaaaactaccttgggtaaacacatacatcagcgtgggtctcaaaggtcgagctgtaagatggcagccacctgcctggattctgcagctcagggtgcaganccactggcctcctggtgtcccaggtaaaggaactgccgcaccctggcctgcagaggtgatgtggggttaggtggtgcctggggtagagtggtgcccctcacatatgtcttaccaaaaggaaaggtgaggaaggggcctgggagcagagaatctgactccaacctcctgccgctgggactgggcaggacccttggccgtcctgggttttggctttctcacctgagtcatagaggagctgaatgggatcacgggctctcaacctggcctgtatctcggaatcacctagaagcctttaaaataggccagtgctcaggccccaccgcacgttgg

SEQ ID NO: 5611 - DNA, 661 bp, Homo sapiens
  DSCAM
  misc_feature [331]..[331]: Chromosome 21, SNP identification no. = rs1882797
  misc_feature [331]..[331]: allele = g, in linkage disequilibrium with rs1000371, respectively
  misc_feature [331]..[331]: n is a, t, c or g
gtatttttagtagagagagggtttcaccttgttagccaggatggtctcgatctcctgaccttgcgatccacccacctcggcctcccaaagtgctgggattacaggcgtgagccaccgcgcccagcctctccttaatttctaagtaaggaaacagagaactagggggtttaagactggaaatgactagacctattccccttgcctctctcctatccctaatgcaaagttctattttatttagtaagtttattaaaaaatcaatattaccataaaagtaatacagtaaaatgatcttcattaatccctaaagtgatgaatctttcccatcccntctcttcccttctctttcctccttccttcctccagggtctggaaagctaaatggtagtagcagcacagttagttaataacgcatctgtccttctgtcctttcacgtctcagatcattttcatatcatgagcttgcagcaacacatgtgtttctcagtggagaagggattcttaattccatttacctataattacctaggatggggaaactaagtaattagcctaaagtcatacaactagtaaatggaagatctagaaggagaatccaggtcttctgattccaagtgcaaagcctctttcccttatagtagcggaggaggccaagggtgca

SEQ ID NO: 5612 - DNA, 661 bp, Homo sapiens
  DSCAM
  misc_feature [331]..[331]: Chromosome 21, SNP identification no. = rs7278621
  misc_feature [331]..[331]: allele = c, in linkage disequilibrium with rs1000371, respectively
  misc_feature [331]..[331]: n is a, t, c or g
aaaaaacaaaaaacacccacagtagtatcttcccagtcacagcgaatacttgctgtcctcaggattcttttttttttttttttggtaaaatacacataacaaaaaattggtcattttggtcactttcagtggacaaagtacattcttagtctgtcttcaaatcagaacacccttggaagcccctcattctggggcctgagtccatttacaggagactccccataaagtccttgaaatttccattttctcagctgcaaggcacattgctgtacagccttcactacaattcatcccccaaactttttcttcttcccaacctgaaacttggcanctcttaaacaatccctattctctccttttcctggcccccaggccctggcagtcaccattctactttccgtctctatgaatttgacttctctggggacctcctataagaagaatcatacagtatttgtctttttgtatctggctcattttacttagcataatctcctcaaggttcagtcaagctgtagcctgtgtctgaatttccttcttttctaagcctgaattatatttcaagatatgtgtacacagcatttttttaatccagtcatctgtcaacggacacttgtgttgctttcaccttttggctattgtgaacactggtgtacaaaac

SEQ ID NO: 5613 - DNA, 661 bp, Homo sapiens
  DSCAM
  misc_feature [331]..[331]: Chromosome 21, SNP identification no. = rs2837491
  misc_feature [331]..[331]: allele = a, in linkage disequilibrium with rs1000371, respectively
  misc_feature [331]..[331]: n is a, t, c or g
ttaatgagattatgttagaggaaccctctgagggtgttggaagaatggccccacagaaacaccaagtgtgattatccctgctgcagaatcaaaaatttctcctgtccaaatacttattgttcataagatttcggcaagtgaggctgcctactgggcagctctaatccttataaagaaaatgatttttccagccaggaattaacaaattcttagcacatactaaaatatctcctcagctgggttattatgcttacataatgaagttacttagattataaccgttaatcaaattcatgtttccaagctggagtgggtcatatttgatgctaancttgaacaagaatgacaacatctccacttcctggcagcttttccaggcccttatgacatgattgaatgtgtcaggggaaagacgaagaacatttagggttcatattacattcactctgaagttatttcaagtcacattattggaagaaagttgatttattttttaagacaagtatgaatattaaccaaaagatatcaaaaacagtattttcctctaactcgcatggaggcaggctggccatttctttctttttttttttccatctgtctggttctgtacataggtactatattttgcccaataagaaagcttcttatttatttatttatt

SEQ ID NO: 5614 - DNA, 661 bp, Homo sapiens
  DSCAM
  misc_feature [331]..[331]: Chromosome 21, SNP identification no. = rs2005934
  misc_feature [331]..[331]: allele = a, in linkage disequilibrium with rs1000371, respectively
  misc_feature [331]..[331]: n is a, t, c or g
aacaagaatgacaacatctccacttcctggcagcttttccaggcccttatgacatgattgaatgtgtcaggggaaagacgaagaacatttagggttcatattacattcactctgaagttatttcaagtcacattattggaagaaagttgatttattttttaagacaagtatgaatattaaccaaaagatatcaaaaacagtattttcctctaactcgcatggaggcaggctggccatttctttctttttttttttccatctgtctggttctgtacataggtactatattttgcccaataagaaagcttcttatttatttatttattagacngagtttcactcttgttgaccaagctggagtgcagtggcatgatctcagctcgctgcaacctctgcctccctggttcaagcaattctcctgcctcagcttcccaagtagctgggattacaggcatgctccaccatgcctggctgattttgtatttttagtagagacggggtttctccatgttggtcaggttggtttcaaactcccaatctcaggtgatccgcctgcttcggcctcccaaattgctgggattataagcatgagccattgtactcagcagaaaacttcttaataattatgtagaaaaaggaaaatagtaaatagattttgatt

SEQ ID NO: 5615 - DNA, 661 bp, Homo sapiens
  DSCAM
  misc_feature [331]..[331]: Chromosome 21, SNP identification no. = rs2837492
  misc_feature [331]..[331]: allele = t, in linkage disequilibrium with rs1000371, respectively
  misc_feature [331]..[331]: n is a, t, c or g
tacttgggtgccccagttctctctctttctgtctgatcacttgctccagggaagcctgccatgatatcaccaggatacccatgtggcctatggagaggaccatgagaaggacaagtcttgggccaatagcctgccaacaaccctgtgtgggagctggggggtggattccacccccgccacccttcactcttatattcagatgcatttcccagaaggcaagcagtttccatgtggcttggggacagacacagagttgtcatgtctgaagccatgttctaacttttgagcagctgctttatgtacagctgtttttcatggagaaacagagaanataaatcatcatccccattagcactcaatggggtggtgaattctaccatgtcttgtctccatcacccactgcacagcacactgcctgtggctcccagccgttcagtgtgctgtgtcttctggaagctgggctggttatctccttgaacaagtccttcggcctctctgtgcctcaatttctgtacctataattacagcaccccctcctagggttgctgtagagattacaagctaatagctctttagggtgtcccagggatctcctctacctgaagattcttgtccaaaatgggccaacgcccagtattttgatccttccttcaacgttata

SEQ ID NO: 5616 - DNA, 661 bp, Homo sapiens
  misc_feature [331]..[331]: Chromosome 22, SNP identification no. = rs7286951
  misc_feature [331]..[331]: allele = a, g
  misc_feature [331]..[331]: n is a, t, c or g
gagggccttcttgctgtgtccccatggggcagaaggcagaagggcagaagggcagaaggcagaagggcaaaacctgcctcgctggttccttcaagccgttttacaaggtcactgatcctgtttatcagggctccccctgcagaacttaatcacctcctaaaggccttgtatcttaatgctgtcacattggcagttaagtttcaacacatgaattttgggggcatccaggccatgacagttttcaaacatttttctgcatatgtaggacccatcaaacgctgtactcctgctctggtgcacacactgagctgggcatctgggttcaacaatncttcactttcctggcacgcagagctgaggggcagggacagagatgaaatctctgaggcacagtgatggtatcatggaaaccttgaactgaggggagggtcggagttggtttcactgaggaatcgaggactgagctgagaaccgaaggatgactgggaacctcctgggtgctgtgggactgggactgggggcgagggagagggagtctcagatggtgggaatcccctgtgtagtggccctggggcctgatggtggccagaggatggagcccagagggaggggaggatggtgaggcaggggtggaaggtaaggggtgttccaggcccggtta

SEQ ID NO: 5617 - DNA, 661 bp, Homo sapiens
  misc_feature [331]..[331]: Chromosome 22, SNP identification no. = rs4819808
  misc_feature [331]..[331]: allele = g, in linkage disequilibrium with rs7286951, respectively
  misc_feature [331]..[331]: n is a, t, c or g
gggcctccagctgggttcttcctgtcctctagttggtgcctgaaggccccagttgggtggggtctctctttaccctctggtcatatagcaaactgtggctggtgtgtggtgagtcagccctgtgtgcaggcagggtcccatttccctgtgtgcaggccacagtctgtcccagtgcctgcaaggcctctgccccagctggcctggaccccccttgccagactctgctctttgtggggctctgcccacatctactgcccagtaggacgcccagtctccactgctctttggaggtaaaagagggcctggcacactggcacggggtactttcccnaaggtcaaagatgtgttgagtgaacgaaggtagagagttcatttctgagacctttgctggcctaattcagctcagtggggtgaagttattactgttgagatgcttgctgttttgattgtctttagagagcattcttaatatttggatggtttaaaataccaaggagaaaaaagggaggagaggcttcttttttaaaaataccaacttcattatgaaaacacacaaatgtacacacaaatagaataatataatgacacccctcccaccaccacacggcctgtttcagtctgtgtccacagcgaggcttctgaaggaaaggctgtggagggg

SEQ ID NO: 5618 - DNA, 661 bp, Homo sapiens
  misc_feature [331]..[331]: Chromosome 22, SNP identification no. = rs5746789
  misc_feature [331]..[331]: allele = a, in linkage disequilibrium with rs7286951, respectively
  misc_feature [331]..[331]: n is a, t, c or g
actttaggaggccgaggcagatggatcgcgaggtcaagagatcaagaccagcctggccaacatggtgaaccccatctctactaaacatacaaaaattagctgggcatggtggcacgtgcctgtaatccccgctactcgggggctgaggcaggaaaatcgcttgaaccagggagtcggaggttgcggtgagccgagatggcaccactgcactccagcctggtgacagagtgagactccgtctcaaaaaaaaggatccttttgtgctgtgtatattttaccacaattaaaaatgcaggagttagtaaaggaatggaacaagatcatgtgaacntgagttatgagaatactggaatggcatccggcaaagcagactcagaacaggactgttcctagagatagggaggactgttttatgcggataaagtggtcaagtcatcaagaagacattatgatcctaaatatgtatgcacccaatacagagcaaaaactgacagaaccaagagaacaaatagacaaatgcgcagttatagctagagatttccacacttctctctcagtaaatgacagaacaaggaggcagaaaatcagtttaagaatgcagaatactgcctgggtgcggtggctcacacctgtaatcccagcactttgggaggccaaggta

SEQ ID NO: 5619 - DNA, 95804 bp, Homo sapiens
  PADI4 gene - 17379998 - 17435801 of chr1; NCBI Entrez Gene ID: 23569; Build 35; sequence includes 20,000 bases upstream of initiation codon and 20,000 bases downstream of termination codon of the gene
caggagttcaagaccagcctggccaacatgctgaaaccccgtctttactaaaaatacaaaaatttggctgggcgtggtggctcacgcctgtaatcccagcactttgggaggccgaggtgggcggatcacgagatcaggagatcaacaccatcctggctaacatggtgaaaccccatctctactaaaaatacaaaaaattagctgggcgtggttgcacgtgcctgtggtcccagctactctggaggctgaggcaggagaattgcttgaacctgggaggcagaggttgcagtgagctgagatcgtgccactgcactccagcctggtgatgaagcgagattccgtctcaaaaaaaaaaattagctgggtgtggtggctcgcacctgtaatcccagctagttgggagactgaagcaggagaatctcttgaaccagggaggcagaggttgcagtgagccgagatcgcaccactgtactccagcttgggtgagacagagcaagattccatctcaaaataataataataaagaaagctctgcatggggaaaagcttagcatgaaattttggggtgagggatgggagcagggagacaagtcagaaggtggcagctagttcagccgaagagaagccaccacattcaattcactctttgtggggaaaccggaagggacgggcttactggacaggacgtggggaacagggaaaaggcagggacaagagtccctcccagagtttgagatttatttactcattgatttattatgaagtaaatcattaatacaagacaagttttttataatgtttctgaatgactaaaagaataattatggaatgaaaacctgtatactctggctgggcgtggtggctcacacctgtaatcccagcactttgggaggccaaggcgggtggatcacaaggtcaggagatcgagatcatcctggctaacgcggtgaaatcccatttctactaaaaacacaaaaaattagtcgggcgtggtggctcatgcctgtagtcccagctactcaggaggctgaggcaggagaatggtgtgaacccaggaggcggagcttgcagcgagctgagatcgcgccactgcactccagcctgggtgacagagtgagactccatctaaaaaaacaaaaccaaacaaaagcctggctacagcaaagctttggtaacaaagcaggtacgtgtatcccccatttgcccaccatgatgggccagtggccactcccccaggactcacagatgagtcaaagcagtgggcaagttttttcgaggcttcgggcaagaaaagggctgggatccctcttcccccaagtgcttccccccagttctgggccccacgcctgggtctcctggttcacagcattttattgttatgttggtggtgaggatttgagatggttcctgataggatgtcagggggcaagggtctccttccgagttcctggaaaggaatgcacactcagaaacccaggctgaacgttgccggtgtgggtgcttggtggatgtgtctgtcctggaccagcagatggaaactaactaccgctcagctggctctctgaagcaatgctgtctttcaagagctggaagccagcaccaaagctagctccatagtttcttttttgaactcttcttgggtctttaaataagtcttggcattctgagaaactgcatctcaatgccaattatcttaactcaaaacatctcaatcacagaaattatagctgccttgggcagtttccagtgctccagcaagcagggacctgagcagggctgggcagggcatcattcagaagtgtttatgtgactaacgctccccaggagtctactggacagctcaatcagcacatttacttactggtgttttttttttttttaattcctttgccaaattcctctagggatttgaggcaacatatattaagagtacattcaacaaactgatgatttaaaaaaattttttacattaagacaccaaggccagacacggtggctcatgcctgtaagcccagcaccttgggaggctaaggcaggtggatcagttaaggtcaggagtttgagacgggcctggcaaacatggtgaaaccccattctactaaaaatacaaaaattagccgggtgtggtggcgggcgcctgtaatcccagctattcaggaggctgaggcaggagaatcgctgaaacccaggataggttatcttgaaataataataataataataataatacaccaaaacagaaaaaaaaatccagaaaataaaacccatggaaaaggacaaacaaatatatgaccatgagaaccaaactatcattaggattggagcttcccagtagcccttgcaagaagggaaccagagtcaaccacctaattctcattatcagaaggaaggcagcatgccaaaatgattcccgtcatacatggacctttataaagggacgtggagtggtcagtgtgctcaaccaccttgcaagagcaaattctacatttgctcttagccaaaaggccaagaagcagttgcaagaccaaatttaatgggagatttcctatggttgagcctccatttgctcatctgtaaaatgggaataatgcttaccttcacgggttgtttgaggactacagcagtacctggcagacagcaagaacctaacaagtgtttatttcttcattttctatccccagcaagcttagggccttcttcatcctctccagggtagctacttaatcctcacacctattttacatgggcacaattttccctactatgtgtccagctcagcagcagattctggggatacagcagtgggtgagcagatatggaatctgcctttaggaagctcataggttagtagagaagcagggcaaacggagagtagcaacaatgtatggtaagtacaattgtaaagccataataataactgtaagagcttctgttttgtagcacgtaacctgagtttgctagctgtgcttgacaagaacagaatgagaaagaaaacctacgaacataacaataaacccataaatgcaaaaattctaaacaaaactattagcaaactcaattcaaaaatgatacaatatcagattatacaatatcagatcagaataaattgatcccaggaatgcatgtttcatcttagaaaatcaattcaacaggttaatagatcaaagaaaaaatttacatgatcatctcaataaatcagaaaaaagttaataaaatcatcatttatgatttttaagcaaaacttaagaataaaaagaaacttctttaaccccataaagaatagctataggctgggtgtggtagctcactcctgtaatcccagcaatttgggaggctgaggtgggtggatcgtttgaggtcaggagtttaagaccagcctgggcaacatggtgaaaccttgtctctactaaaaatacaaaaatcagtggggcatgatggcacgtgcctgcaatcccagctactcaggaggctgagacaggaggattgcttgaactcaagaggcggaggttgcagtgagccaagatcacgccactgcactgcagcctgggtgacagagcaagattctgtctcagaaaaaaaaaggtacaatagtgattctcaaagtgtggtccccagaccagcattagcattatcagcattaccagggagcgtgtccaaaatggaagtcctcaggcccacccacaccttctgaatcagaaactctggaggctgggggagcagcagtctgtgtttcaataagcccttcaggtaattctagtgccactgaagtttgagaactactgatctataagaaactcacatcaaaaattattcttaatgataaagtattgaaaccattccttctaggatcagaataagaatacccattatcataactgttaatcagcattgaacagaaggttcttgccattgaggtataagattagaaaggaattattatatatacagaaaatccaaaagaatctacaaagtaaaagaattcataagagggtttagcgaggctgtcactataaaaccaatatacaaaaatcaattgtatttttttttcttgtgggacagggtcttgctctgtcacctaggctggaatgtaatggctcagtcacaatgtactgtagcctcgacctcctgggctcgagtgattcccccacctaagtctcccaagtagctgggactacaggtgtgtgccaccatgcctggctattttttttttttttttttttttttttgtagagacaggatatcgcatgttgccccagctgattgcaaactcctggcctcaagcaatcctcccgccttggtctcccagagtgctgggattacaggtatgagtcaccacacctggcccaactacatttctatatactaaaaagaaatagaaaatggcaaatttgaaatgtgccatttataagagcatcaaaaagtaaaaaacaaagcatatctaacaaaagatgtgcaaaaaccttatggagcatactatacaactgtattgaaaaaacattagaggagatctaattaatggagagatacgccatattcatagattgaaaggctcaatattaaaaagatttcagttctctgcaagacctacgaatcagtgtaaatccagtcagaatctccacagggtgcgtgtatgtgtgtgtgcacatgtgagagcatgcacttgagaggggaggggaggggagggaaatgtgggaggggagggaggggaatggggaaggggagggaagggaagggaagggaaggacatttataaggtgattctaaaatttatatagaagtgcaaagagccaagaatagctaagtcacccttgaagatgaaagataagagaacttgctctaccagatatcaagacttattataaagccacagtaattaagacaatatagaacttatgcagagacaaatagaccaactacacaaaacagaaggcaagacattttattattgaatgatagaagttatttattaatcctatatactgatcattcgtcgtttgcatgtgttacaaacatattttctcccagtttgtggtttatatttctactctgttaaccacagttatttctactcttttaaaaaccagaagctcttacttttaatatattaattatattacatatatttaatatattaaaatagttacatttatcattctttcctttttatcattttgttctttgtgaaccagtatctaagatgtacaaataactcctaccattcaataaacataagaaaaagaagtagataaacaatccaacagaaaaggtattcaacctaattagttatcggggaaattcaaattaaaacctcagtggtatactattacatgctcaccacttaggaaaaaaataaatatacaaaatagaaccgggagcaaggatgtggaagagctagacccctcacaattgctgatgggaaggaaattggcattagccctgaaaaacagtttgtgctattcagtgaagttgaaaatgcctatacccaatgctagaaattcgactcctaggtaatacctagagaaacccttgcagttctgccccaggagacatgaatatccatagcaacattggtcatgttatccaaaaactagaaacagtgcccatcaccagtagaacaaataactaaattgttgtctattcatacaatggaatattagagagtgatgaacaatttatgactcacacatctgtggctgaccgccactgctactgcttgagaccatcactacagcagctactactgttactgcttgagaccgtcattacgagactgaacgaagggatgaacgtagaaatgaaaacctaagacaaaagaaactattataaaggaaggggaaccagggaagaagaagagagctccctgcttctcgtgagcaaaggcaatccccgagcttccacagcccttctcatttattgggtagaaagagcagggaggaggaggcaacgactggtcagctgcttaattgatcacaggttcacatcattactagcaggcttcaattacacctaatcacaggaaacacttgtgcctgggttgtgaccgcccttggcggtccttctgggtgacagacgcagtttgtcagtttgccagcatcctgctttcatgagcacagcttgctgtttactcacacagcctccagtggtatactgagttgatcacgaccctcactcctttggcctccaacatacatcaacatggataaatttcacaaacacaatggtgagcgaaagaagcaagtcacaaaggaataaagtgtgctttcgttcacataaagacaaaaacaggcaaaactaaacagtaaccactgcacttgacccttaatctcagcgctttgggaggccaacgtgggaggatcacttgaagccgggagtttgaggccagagtgggcaacatagtgggaccctgtctctacaaagaataaaataaaataaattagcgatcatgatagtgtgtgcctgtactcccagctactcaggaggctgagttgggaggatgagtccaggagtgcaaggctggagtgagctgtgattgcactactactgccctccagcctgggcgacagagcaagaccctgtctctaaaacaacaacaacaacaataaagtacaaaccataaatgcaagggaatgatgatcacaaaagttcgcgtaactgttagtcctgggggcggggggatgtagtcagggagatgtccccaaaggtggctcacgcctgtaatcccagcactttgggaggcccaggcgggtggatcacgaggtcaggagatcgagaccatcctggctaacacggtgaaatcccatctctactaagaaatacaaaaaaattagccgggtgtggtggtgggagcctgtagtcccagctacgcaggaggctgaggcagaagaatggtgtgaacctgggaggcagagcttgcagtgagccgagatcgtgccactgcactccagcctgggcgatagagcaagactccgtctcaaaaaaaaaaaaaaaaaaaaaagagtactaaagactttctatttcttaacctgggtggtgtttacacggtatttagtattatcccatatatgcacgtatgtttacacactcctccagatgtgtattttgcaattttaaaagatgcacacttttaaaagatacaaaggcaatcatgaatgcatatgtatgtgaattaatccagttactccacactgttcacactgacaggacaaagaggaggtctggcctccagtgggcagattgcagaggactgagcaacccacggtgggggcgctgcgggtgggttggcagggggccagctgctggaagcttggggaagagcaggttgttgcacagtggggaccacaccaggatgccatcactgagccgcctctctctggaaaagtccctgggcacatgtgggtgggtggcagctgtgtcaatgaagtcttgcccatttcccagggagcacaggtgcatgggcatgggggaaagaggaaggaccagtcaccagaggaagattcaagccaagaatcttaaacttgggtccccaggtggggtccaggggtccataaatccatccaactgtacacagaaaattccatgtgcatgtttcaggcgattgtgttcccagctgtcttctgcttcttgaaggagtgttaagcctcccctagcctgtagaagatgccatgtgtgcccacccactcctcctacaatccctccttcagctcaaagagacccggcctccaagtgccggcacctgtactgtttgcctgaggccttctctgaccaccagagcctgctgaccaaatggccagggaactaataccacccagagcagccctcagcaaatgacaaaaggaagtgggagtataaatgccccagttcccttgctccttgggctaactctgaggcatgggcttcacactactttctagcactcctcaggggggtgatcttcagttactcacaggtggtaactaggtcattcacagaccctttactcgcttctttccttccctgactcactttcccactgtctaccagtgtatcctgcacctcccaaataaacctcttgcacacaaatccttgtctcagagttgccttctggggttgcccaaactaagaaattcccagaagatgaagaacgctaaccgaagtcagaagaggaagtccctgccttcgttctgcatccacttgcctgtagctttaggaaagttacagcttctacccgagcctcattttccccacatgcaagaaaagaaaagctaagggcatcttgattgcttcctttaaatgttcaaaagactaaatgaccccataggattaggaaccctgccttaaactatgtgtttggtgctggttaatttttttgtgtcaacttggccaggccaccagttcccagatatttggtcaaacacccgtctggatgttgctgtgaaggtgtgttttagttgagatttacatttaaatcaatagacttctagtaaagcagatgacttccgtattgtggtgggcctcatccaactggctgaaagcctccagagaaaaaagactgacacccccgcaaggaagagggagttggagttctacgcctgttgtcttgagctgcagtatcagctcttccctggtctccagcctgctggcctacttaacagattttggatttgccagcctccacaatcatgtgagctgagccaattccttgaattctgtctctccctcactccatatatatgaacatatatagatgtagatatctatctatctatctatctatctatctatctatctatctatacatctatatgttctattggttctgtttctgtgtgtccctgatgcctaggacagaggggtgctcagcagaggggtgctcagcaggtgtctgttgaatgaatctaaatcagaagatcagagggtctgggatcttttatctccccctgtatttggccagcaaaaccttgtggttaacgctttgcaatcagctaaatctgggttcaagtcctgatttattttactaacagttgtgtgatcttggttgagtcattccacttctctgagcctatttccttgcctacaaaatggggtcaataatgccttcctcatggggttgagataagaattatgtgaggccaggtgcggtggctcatgcctgtaatcccagcactctgggaggccaaggcgggcggatcacctgaggtcaggagttcgagaccagctggccaacatgatgaaaccccatctttactaaaaatacaaaagttagccaggtgtggtggcacgtgcctgtaatcctagctacccaggaggctgaggcagaagaatcgctggaacccaggaggcggaggctgcagtgagccgagatcgtgccactgcactccagcttgggtgacagagcgagactccgtctcttaaaaaagaaaaagtaattacgtgaggtggtacatgtcagcagctcagcctggagcctgcagagggctcagcacaccatagtcaatgtcactggctgggaacacgaacatcaggacctaccattctctgcacgaaggtacctgaggaaatattatttgggggcagcatatttgaaatcagaacattccagaaaaattgaggcctgaatttcttgagacctggaaagaggccctgacacatgagcgttgaagaaattgaatggaggtggggtgcacaaatagtatgttacagccatttgaggccctgattagtgaaaaataggatgagagcactgaagtaagaggagatatagcatccccatgcctaactcttctccatcatggcttctgggccccggagtatagggccaaaagacacgttcattctaaacccacaggcagctgaagacgcctgggcaaccctgcttagcaagaaggaaagcttggggaagtccaaggcacctgggaagagaagaaccaaccaccaaccgaacaggcagctctgccaacacccttgggacagcatgatccagccccgcctcatgacttctgctgggtgtgaatcacggaacaaataaattttggaaaagagaatcactcaagcctgacagaggagaatgtgaggtgtcagagttattttaaaccaacctgaggtacaagttttatggcagtgttacatgaacatagctccaggttcaaccttcaatttgcggttggaaggacgcaatcacagtcctaaccagaaaaagtaaagtgatgaatctgtgaggttgcaaactgcctgcagtttgcaaagctccagtttcccggctttggcactaaccgtctcccacttctagcccctcacctctaccccagccctgccaacatctctcctgaccaatattgctctaacataataacaagaacaattacaacatcaacaacttgatgacaaataccgggaacatttgttaatctcattaggcactaaatgaacataaaatgccaccatcaaaatagcagaaacagaaacaaaaaagaaagtttctggacaggccagggtgaagtgaacagcctcgtgtgttaaatacagaggtgggttttgatatcatcctttggaaaacagtttcaaatatcaggagttcaatctctaggaaaataaacaaagaagtaactctaatcagacacaaatctttattagggattcataatagcaaaaaatcagaatcaagctggtcaaaatgttagaaacctatgggaatgagtaggatgctcatatattgctccatttgatgcaatatatgaaacctctgaggtctttatggtaatgcgacagatacctttcatgttaagtgaaaaaatatggctacagaagaaaatgatccatgaaatgacaaagagctaaacaagaaagtagaagtggtctaagtgatggtggttgtagtaatcattacctatggaacaatttccataggtaattaggaatgatttgcttaaattaggcatgatttgctttgactgcatcttttaagtttttaaagtatggaaaaagagggaagatcaggtgtggtggctcatgcctgtaatcccagcactttgggaggcccaagcaagcagatcacttgaggttaggatttcgagaccatcctggccaacatagtgaaaccccatctctactaaaaatacaaaaattagacaggtgtggaggtggaggttgcagtgagccgagatctcaccattgcactccagccagggcgacagtgtgagaccccatctcaaaaaacaacaacaacaacaaaaacaaacaaacaaacaaaaaacagtagccaagacatggaaataacctaagtgtccatcaacagatgattggataaagaaaatgtgatacacacacacacgacacacacacacacagaggaatattattcaacctttgaaaacaggagaaaaccctgccatttgagacaacatggatgaacctggaaggacattatccaggtgaaataaactaggcacataaaaacaaatgctgcatattctcacttataactggcatctttaaaaagttgaactcacagcaacagagacaagaatggtggttaccggggatgggggtaggagaagatgggagatgttggtcaaaaggtaaaactgtccattgcaagatgaataaattctggaaagctaatgtacagcatggtgactatggttaataataatatatcttatacttgaaatttgttaagagattagatctcaggtgttcacatacacacacactcacacacataactgtgtgaggtgatggatatgtcagctcgattgtaataactgtgtgtgtataacaaaacatacacttttttttatttattcattttttctgaggtggagtctcactctgtctcccaggctggagtgcagtggtgtgatctctgctcactgcaacctctgcttcccaggttccagcaattctcctgcctcagcctcctgagtagctgggattacaagtgcgtgccaccacactgggctaatttttgtatttttagtagagatggggtttcactatgttggctaggctggtctcaaactcctgatctcagttgatccacccacttcagcctcccaaagtgctgagactacaggtatgagccaccttgtacggcctcatactctttaaatgtatataatttttatttgtcaatgatacctcaagaaagctggaaaaaataaatcagtattgctactattaataatagttttgaaacagtaattggaaaaagttaaaacaaaaactatataaaaggctgggcgtggtggcttgcacctgtaatcccaacactttgggaggccaaggtgggtggatcaccttaggtcaggagttcgagaccagcctggccgatgtggtaaagccccatctctactaaaaatacaaaaattagccaggcgtggtgatgggtgcctgtaatcccagctacttgggaggctgaggcagtagaatagcttgaacccaagaggcagaggttgcagtgagccgagatcatgccactgcactccagcctgggcgacagagcaatactccgtctccaaaaaaaaaaataaataaataaaaaacctgtaagatatgaaatctaaaattctgttaaaaatgggaggaaataaaattgtgtgctggaaatgactatctgattgaaaccaggtgatatttttattttgtatttccttcaactcatatccccctccaccaccatttttcttatgatccacttatagtaaggagggggaaatggtttctaaactttttaaaaggaaactgtggaactcactaattctaccatgcaaaatatgaggtctcctttgtggagtttccatcaccagaaagcaaagttccaaaactggtggcattttgagtctcctccagtgggtagggtaagaactttgaacattgtcagggagaggtgtcttcttcaaactcccaaataatgagctggttgtttccccccaaaatagaagaaatttatcttttgacttagtctctgccaagctggggaagcctcctttccccagggaggaaagcagattctgagcctattctccactggctgggccagataccagttgtcaccagcaccaagaaagcctctctcacatggttgctatgggcccttcacatccaactgtccagtggtggaggaaaagtcttggacattgagccagcttgggtctaaattcctattaaaatccctggtggccaacatggtgaaaccccgtctctactaaaaatacaaaaatcagccatgcatggtggcaggtgtctatagtcccagctacttgggaggctaaggcaggagaatcgcttgaacccgggaggtggaggttgcagtgagccgagatcgtgccattgcaatccagcctgggcaacaagagtgaaactccgtctcaaaaaaaaaaaaattagctgggcgtggtggcaagcgcctataatcccagctactcaggaggctgaggcaggagaatcgcttgaacccgggaggcagaggttgcagtgagccgagatcatgccactgcactccagcctgggagtgcccccccaaaaaagagaaggggggcatgttgggagaaaagctgagtgttgggagagaagctgaggcagggcttgcatgtctgctagacttgctggctgcttgcttctagcactcccattatctcaagcagccatatgtttttcattcacttgatacactgtttcctttcaacccccacatcctcaccacctgtttgtttgcatcctcaccacctgttagtttgtttgagcaccaataaacagtgtgggctcccagagctcagggccttctcagtcttcacactcgcaatggccccctggtcccacttgctctctcaaaaggtctttttctcattcctttgactctgccagactttgtcgcccccacgacctggttttgggtctgatcaccccaacatatggtttggtgctgtctttgtgatagcgagtgagttcttgtgagatctggtcatttaaaagtgtgtggcacttccccaggctcgctctctctcttgctcctgctttcgtcctgtgaagtgtctgcattctgcttcaccttccaccatgactgaaagctccctgacgcttcactagaagccaagaggatgccagcaccatgcttcctgtaaagcctgcatgagccaatgaaacctctttcctttataaattacccagtctcaggtatttctttatagcaaggcaggaagagcctaatatactacccaattttaagatttatcatatagctacagtaatcaaaattgtgttgtattattggaggaacagacacagatcaatggaactgaatatagaacctggaaatagccccacacatgtatgcccaacatgtacaatttttgacaaagatgcaaaagcaattcaatttcaatttgttgaaagagagtcttttcaacagacgatgctagaggaaggaatgtatcttaaaataaatagtgtcataaattcagtaaaatacagtatttcttgtgcacctactctgtgctaggccctgtcctaagcactagggagataacagtgagcaaagcaaagtccatgctttcatgtcactcacattctcatggtcttggtccccaggagaaatcctgggtgccagagaagaaatgtaagcacctggtgtcaagggttgggtaggagccagttccagaaagggaatgcagagacatttgccttcatctgactggtccccttccttttctcaaaggtggcagaggggaaggttgcaggcttttgatgcagatagatttgggctccatctcctgtctctgcccctaatgtgctactcatctgtcaatgactgacattcactgggttagtgtattgttcacatgaatgggctccagtgcagggcagagcctggcacatgttagagtcatgattatgcccttgtgtgcccatgaatccttccaaaacctagaaggattctgcaagggagagaaaggagagatgctgggggcagggaagagctgtgtgaacagagaggagaaaagactgcccctgcaatacacacagcaggcagggggctccgggatgaacactttgcaggaggaaggattttcttttttttctttttttttttttttttgagacggagtcttgctctgtcacccaggctggagtgcaatggcatgatctcggctcactgcaacttctgcctcctgggctcaagtgattcttctgcctcagcctcccgagtagctgggattacaggtgcctgccaccacgcccagctaatgtttatgtttttaatagagacagggtttcaccatgttggtcaggctgatcttgatctcctgacctcagatgatccacaggaggagggattttctagtttcagccagcctggatgatctagacatgctccagtgttctgctagaagtcatgaattcagagaggctgagagaccagggttctttgtgctggaagggtcttcagaattcattggccaagtgacctggcctgggggcagctgcatagccctagagtggacgaggatgcaggggcttgggagttagaccacgcaaaattaaacgtaagtgtcaccacttccttctgcgtaaccttgagtggttacctaactcctctgagactcggtttcctcacctggaaaacggggagagatgttaaggttgctgtgaggattagagatgatgcatgttaggacctggcataggtcagggctacaccagggcatggcatgttggatgaagccaaatttgaaacccccctagaggccgtgtgaccttgagcctggtgcttcactcttctgtagaaatgagattgtacctgttgccccacttaatggtgagaattagaaataatagagcccaaggacctagtgacaggtaaacacatagcaggcgttaatagatggtggtctctattatcaccctgggtgcttctacatttatgttaaacaaagcctaggttagcttctaagcgagggccaggcacttaggaggcattcggtgaatatttgttgaatgaacagctcagtgttgggaatgaactgtacttatgcatgaataatgctgaagcaagagctaggctatctgctgtaagaacagcactgcactatacccagacacagagccactgggagagtcctctgaccctaattcctttcccccaaatgatgtcattgcaatcaactggagcaggctagccagccagtctctgggacaggagctcaggtggcctcagccctctgggccccaaatgcctagagggtatttggcaacacccagaacacccttgcttcctctgcgtgagctgggctggtgattctgcctttcagcaggaagagaggcctcttcctccagggtttctggcctggatcctgagccgctcaccatgtataagagagttcactccccaaccccaaaggtcccctttgggctctgaaagggttaatgccatcagcaaaagaaacagccaggccgggttctcagggatcttcacaggatcctgtctgggtcaagtactgggctgggtgctgggaacacaaacagccacggcgttaagccaccagtgttgagtgacaagtctaggcactggccttgctctcaggctagctgggggatgggcatttaaacacaaggtgtggcaaatctcaggaaaagaatgaagcgctctgccaaaaaactaaagaggggcaaagatgaatctacaacatacctgcaaataaccacagacacgggcacaagtgatgcatcgctgcatggtttatgacactgaaaacttgcagacagcccccatgtccaacagtaggggagcagccatgtcaggatgcagctggagctgcaggcacaggtggggcacgcgccagccccaagtctgttggcctctcattccactgcccttggctcctgccctcagccctgcccatcacagagcccgtggcccttgttccactgtgagtgaccaagtgtgtttctacaaagaggctttgcttccaaagtgcagccgttttccctcagtgtgagtgagtgtgtgtgtgtgtgtgtgtgtgttacaaacctagttttgcattgctccctgtgtaattgcaaatagcatgcattctcttttgcatctcctctccctcatcactcccctgggtctctggtggaggaccccagggctcatccctcggccttctctcttccctatcctcactcattccctaggggagctggagatgttgacatctcactgttttatccttttcagcctggtcctgtctcttaagctccggaatcatgtgttcaaacgtcctacagggcatcatcacaccaaatgacacttggcaaagccaggaccaaactcctgatctccaccatgcccaccccccgcccttccctcagccttccctgcccagctgcgggcagccccatccctccagggcctcaggctccaaactgcggtgtcctcctccatccctctgtctttcttaacacccctcatccagtccctctgcaactcctattggctgtattgcatcacaaaatgtccagaacctgacccatcctcccctcctccactgccaccacgctagcctgagccccaccgtctgtcaccagcctgtgtgcagcggccacctcacaggtcttctggcctcctcccgggtcccctacagtctgttctcacatcacagccagagtgatcacgttcaagcaagttggttcgcggtccttctctgctcaaaatgactccaggctccccacgttacttggagcagaggccaaagctcttaggatgcccgaaaggccctatatgatcgcaccccgccctgggctgctctccccctccctcactgcatttcagccacactggcctctttgctctttcttgaacccgccaggcatgtccctgcctcagggcctttgtaccgattgcactggctgttctcttgacttggaaccttctccctgtgttcctggtagcctttaccctgtcctttttcctttttctaccccactaacatacgatagaatccacttactgcatttattgcttactggctgtctctctcccaacaaaaacaaacaaacaaaaaggctctatgaaggcaggatttttgtccactttgttcacagcgtatccacggtgcctggaacagtgcctggccatcaataggcactcagtcagtatttgttgaattaacaaaactgctttggggctcgtcctctttgtggctcgttcacagcaaatttaaaccccaaactgctgaagaaaataagaaagaaaagaaggaacagaagaaaacaacctcaagagacctaagacttggggtagaggccagccctccctctgatttgctgtgtgaccgtgggcaggtcccactccctttctgtgcttcagtctccccttctgcaaaacgaggactggattgggtgttctctaagggccctcccaactctaacaatggacagctccctcctgccacttcccagtagaagctcaaactagttctaatcatgcggtcagccagagaaattgggtttattaacactgtgtgcaggcagtcatgtagatgcgtcagaacgtcggacctggccacatcatcatctgctggtacagaagataaattttgagcccagagaaggtggtctgaatccagatccccactgtagggcttatgagaccttgggggtctcactcaatctctctaagtctttgtggtctcatctacacatgggcatcctgataggacgcactccatagggatgttgagatgaggcaggatttgaactaaagcctgtttgatcccacagcctgactctgaattaatgaggcaaattctttgcttcaaagccaaagcaagcaaacaaaaaacaaacgcaagatatccaacccacgaaacgctctatgttcacgccagactcccatgcatgcaccctttgagtgctccttgttgggacccatccaccaccccccagttgcctcattaaaggcagagcctggcaccaatggcccaggtgcaaccacagctctgaggccacatgggcatccccctggcaggcgtggcccacacctgcactgtctggtctgacacccagaggccctggcaagaggcaggtatcctggagcatgcagagaacatcaacttccatgccaggaagctcatcttctcttcccagctctgccgcattctagctctggcaccttgggcaagagctagtcacttttactctctgagcctcaattttccttctgtaaaatgggttgtaataataagcccatatacaccttgtattgtagcgagatgtagctgtgatacagtctggaaagcacgtgtcatatagacaggcagctaatgaatctcacactctggaactggacacctttggttccaattctggccctaccactctcgagctgtggaagaactgcacctctgttttctcctctgtaaaatgggtataataatggcaccaacctcagagggctgctgtgagggtgaaataaggggataatggtatgatctagttcacgggtttgtcgtaatgagctattctatgtgaagtgcaggaaaacgtgcctggcatagagaatgtgagctgtcatgtgggtggcccaggtggagagacttgtcccaagcctggttggtctttgaacgtgtagcctggcctgtgactgcttacctaaaatctccccgcttttcccaccttctcctctctgatatgcctgtttgacataggtgagattggatagatcaaggtgttcagggcctctaggcagggatgggactgtgggcatgaggaccaggacccaacccctcagccccactctccaccccaggctttctgagccatccatccttcccaagaaactgacagagccaccctgccactggtaccagcattgacacccatctagaggtccgaggggcagccccagggcagaggagattttgagagcccacacccctgacctgagtggggaggggttgagcctctgggccacagaccgcaggtgctgactcatggcctctgctgggcgatataaaggaaccagcccaggggcttcctacagccagagggacgagctagcccgacgatggcccaggggacattgatccgtgtgaccccagagcagcccacccatgccgtgtgtgtgctgggcaccttgactcagcttgacatctgcaggtaagaggggggccttctggggttttggaggcaggtcaggagatgctggatgacccagttctactgacacaggagcatgtgtttggcccaggctctaggctccagcctctgcagccactgccaggggagtagctggagagagaagaccccagcagccctgggaagtgccagtctcatggctgtgggttctttgccatgtacaagtgcaaattccccaggaacacacgacagataaattattatggggcaaaccaggccatccatctccctgtcttcatcgaggcaacagaagcttacagagagtctgtgacttgctcaaggtcacacagcacgtgtgccctggaagtaaggttagcccctgggcctcctggttcacagcacagtttgttaccccacatctcttagctaagcctccctcagtgggtgcataatagcgtgggtggggatggcgaaacggggctctgtggcggcagagactgaggtaggaagcctggacctgctgctggctagcaaggaggccttgggcaactgagcctcagttgcctcatctgtgaaatggggataatactcacatcatgggctggttataggaattcaatgtgaaaaaatgtgcagatgttggctgagtacttagcacagtggtgggcccatccttggtagtttttatttactcatttaacaaatgctgagtgccatgctctgtggcagggtctgggttaaacaagagagttgaggaatgctctcggggagtgtgcagggtcattgttgttattgtagaacaggaattaaaagaaattttaaaacgtgtaagcaaaaactcagttctatgttaaaaaaaaaaaaaacaattttccctggaaaaaaaaaaaaaaaagagctggagtcccttaaaaattaactgcctgtttttttgtggctagtgagccttattgctcctctttttccaggcattgtaaagaccctgtttctccagctgtgcagctgcaaggtcactagacagataaactcaagctgtaaaaatttttttccttaaaaagtaaaaaataatataatgcatgtctcaattaaataactgtctttgtttcttgcctctataatatgcttccccctgcacagatctacccccgccccatgaaatgcttaaaagataacttaactctttgttcagggctcagtcttttgaaatgttagcctgactgagccagtgaatctaaataataaatcctcctcaacccctcggtctctctgattcctaaattatcctgcaacaattgctgttgtcaggaataggagtggttgcccctggcttccccatcccagtctgggcatcggtggccctagaatggtgcccacaggagtgccggggacatttctttgctactgcctgagccccagcagccagagaacagcaggaaatgtcgggatggtctcccagggccacatggtggaggcaggagaccaagaagttggggagaaaaggaaaaagaaaatcacctgacatcatctgaggcgcccccaactcctctgagaatgggtgtgaaggaaatgacaggagctgaagctagcccagggcctctcccagcatgcccaggctagccctctacccagcgtccatgagtagtaatcaagatcacaagtgcttcctctggccctagagaggtgggtggacagctggtcagtgttgggcagagaggaaggcactgcccatttctcccagaaaggatggggactccggagttcacaggggcctctaaatccttcttttctcctccttcagccacacgttgagcctgtcactctatcccctgaacatctcacgtaacaatggctaatatttacatcacacttcctacattcaactcattcaatggccttgggaggcaggtaatgttgttattcccattttacaaaagaggaaacagaggctccaagaagttaagtaacccacctcaagccacacagctaataagtaggggagccaggactcaacccaggcagcctgactctaggaccctccattctccccatgggtctccgttccagaccttcctgtcacttcttatctgttcttaacatagccccagacagcgcctccctcccatctcctgagcagccatcggcctcttcctgaaccacacaggtgggagggccactccctcctcacctccgcccctcatattcatgcctccataactttgctcaagccattctctctgtccccaaagtcaggaacccgggaggcagaggttgcagtgagccaagattgggctagtgcactccagcctgggtgacagagtaagactctgtctcaaaaaaaaagaggcaaaaacacctaaccgagggtcacataaattaaaggtggcaagctgggcacggtggcttatgcctgtaatcccagcactttgagaggccaagatgggcaaatcacttgtggtcagaatttcgagaccagcctggccaacatggggaaaccccgtctctactaaaaatacaaaaaaattagacggggcgcaatggctcacatctgtaatcccagcactttgggaggccgaggcaggcggatcacaaggtcaggagatcgagaccatcctggctaacatggtgaaacgccgtctctactaaaaatacaaaaattagccgggcgtggtagcacgcagctatagtcccagctacttgggaggctgaggcaggagaatcgcttgaacccaggaggcggacgctgcagtgaaccgagattgtgccactgaactccagcctgggcaacacagtgagtctccgtctcaaaaaaaaaaaaaaaaattagatgggagtagtggcacatgcctgtaatctcaactactcaggaggctgaggcacaagagttgcttgaacctgggaggtggaggttgcagtgaggcaagattgcaccactgcactccagcaagggcaacagagtgagactctgtctcaaaaaaaaaaaagttaaaggtggcaaagccaggactgtctgaccctaaacccaccctgcttcgcagcccaccctgcctccaaatgctggggagtggactcccctgggcactgctccctgtgggcagagctcattcaacttccaaaggatttggtaaaggcctagaaggggtgggggtccaggaggtgccaactgcaaagggcagtgtgcattcagaagctgccatctatggtctctcttcttcctcccaaagtctccttcttcttttttttttttttaaaaacggagtctcgctctgtccagcccaggctggagtgcagtggcaagatcttggctcaccgcaagctccacctcccgggttcacgcaattctcctgcctcagcctccccagtagctgggactacaggcgcctgccaccatgcctggctaatttttttgtattttcagtagagacggtgtttcaccgtgttagccaggatggtctcgatctcctgacctcgtgatccacccgcctcggcctcccaaagtgctgggattacaggcttgagccaccgcgcccagccgggtttccttctgaatagaccagttggcatgacagtggggagcctggacaagtctgtttgtctctctgagcctcggtttacccatctgtaaaatgggaaaattaacaccccttcctgggttacggcgaagattgaattatataatgcacacaaagtgtctggcagaggggtcccctttccaatgcaaatcaaagaaaatgactaaagtgagtgtcaatcattttcagaggtttatttccaaggttaaggacgtgcccaggaaaagaatacagaaacaggaaaaatctgtagtccgtgctttttcctaaatgggtctgggacttcaatatttaaagggaaaagagtgggaattgggccggatgtggtggctcacgcctgtaatcccagcactttaggagaccaaggagggtggatcacctgaggtcaggagttcgaaaccagcctggacaacatggtgaaaccccatctctactaaaaatacaaaaattagccgggcgtggtggcagacgcttgtaatcccagctactcaggaagctgaggcaagagaatcacttgaacccaggaggcggaggttgcagtgagctgagattgcaccattgcactccaacctgggcaataagagtgaaactccgcctcaaaaaaaaaaaaaaaaaagtgggtattggggcaaagaggaagaaagaaaaaaaagatgggtagataagaggtaagtggttgcattgagtctttgatcagctttcactgaatacattttccgtgtgaggtggggagaggaatagtcacttatgccttgagctcagggaatctatattgtcacaaatgataaacatagagcaagggaagaaatcagatatgcatttgttgcaggtaagcagagggataactttgatttctgtcctttgttccatgcctgtgaagataagctattaacttacattgtcagggtgaaattcaacagaactggttcacgggaaagatcttagggctcacaaggaatttccttgtcggcaaattgtgagggagatatgtagcttttttttttttttttttaatctttgtagctatcttatttagaaacaaaatggggctgggcatggtggctcacgcctgtaatcccaacactttaggaggctgaggcgggcagatcatgaggtcaagggatggagaccatcctggccaacatggtgaaaccctgtctctactaaaaatacaaaaattagctgagcatggtggcgtgcgcctgtagtcccagctactcgcgagggtgaggcaagagaatcgcttgaacctgggaggcggaggttgcagtgagcagagatggcaccactgccctccagcctaggcgacagagcgagactctgcctcaaaaaaaatagaaagaaagaaacaatggggccaggcgtggtagctcatgcctgtaatcccaacactttgggaggctgaagtgggcagatcacttgaggttaggagttcaagaccagcctagccaacatggtgaaaccccatctctactaaaaatacaaaaacttagccaggcgtggtggtgcatgcctgtaatcccagctactcgggaggctgaggcacgagaattgcttgaacctgggaggcggaggctgcagtgagccaagatcatgccacggtactccagcctgggcgacagtgcaagaccttgtcaaaaaaaaaaaaaaaaaaaaaaaggaaaggaaggaaagaaggaaagaaggaaagaaagaaagaaaatgggaggcagatttgcatgacccagttcctagcttgactttccctttggcttagtgagtttggggtcctgagatttattttcctttgacagcagcgaggactgcatgagcctctgtgtgtgagagtggcagacactgaatgccaccctcatgggggtggttgatcaggagatggcggatgctggagttggaggaatgatgtcactgtctggggctcaagctcccagtgctggctgtatggagggtgttggaagttacaagaagattcagctctggatggtcttatgataacacatgtgggtcacacgcttgagggcatgcacacacctggtgtgaacccccagatgtttatgaaagttccttgtttaggagctgagaacatctggaacacagccagaggaagcacactcatcttagaatcgaatcccagtggcccagttcccagctggcccttacctctctgagcctcagtttccccatctagcagagagagtggctataaaggtgccagacccacccgtttgtgcccttctcccttcccctcttgaggaagccacatgggacagagggggctgaggcggacctagcccctcggtccacctgctgtgtgcccctcggcctccattgtcttttgagccccttattcatcttcttggtggaccagacacagggcgtgtccctctcctgtccccatcctctgaccacagtgcccaggcagttggaaggcctggcttatcactgaggctttgagagaatgaaggaaaacaacagcacacagaaccaagagaatgagcctccaggctttggcagagaaacaagagccttggttaagttttggttcggccaggtaggtgtatcataaatggaggcacctgagcagaaatgcaccagagccactggggcatctcctggccgggaactgccccctgggctgagctgtctgctgcttcatttattgttattattagtagccgtcccatactgagcagttaccacatgccgggccctccaaaccttgcaaccacccaggaagcaggtcgacgtgattcccattttacagagaaggaagctgaggcccaggagaggtcagtggctaggccaaggtcacagagcctgtcagaagcagcccaaggtcattgcctctctcactcccttcgaggctgcctgctgctcctggcctggcctgggagacgtttccccggggcagctgaaccactccaccccagctggtctgcaggagagtatctgatcccaaactgctccaaccagctggtgatggctgagtgcaaaaccacaagcacatgctgtgccctggctggctggtgtagacagactggcctgctgtggtatgtggtgtgttgggaattcgtatgttccattcacactgaccctggcaatctccccgaggcccaggtcagtgccacccggggtgatgacaacccagccatcctgctccccacccccgtcagcatgggaaccaggctgggagcaggtgggaaagccaccacctgagctgaggggacaggcagggacagccatggcttgagtttagcagatgtagaatgacgtccttgtcaaggaggactggggggagtccacaagggaaccccagattttccaccttgtcccatccacctttgtcctcagcacaaggtctggtacacagtgaggggtgagtgagtgtgtggtgattgattgattgattgaatgaacgaatgaaggaatgagtgtgtgttttaagggaaactatgcctgtcacacaggaggtgctatttaagtgtttgttgagtgaatgaaagaaagttgagagcaggaagggtgtcattcctctttgcatcccctataatgtgtgggacgtacttggcactcagctatcatgaaatctttttgcaacaagagcaggcggaggataaaagggaaagagagaaaaattgagagggatatggagagaaagagaacatactcaaaaacattccaccatcctgacatcagccaccaccatcccttacagcgcaggagcccctacatcccaggccactgggacatggttttttgcttccatggcccttcgggaaggacccccaacactggctcctttggtcaaagactgcagtgtgagttcaacaggagagagagaaggggaggagcaagtaaaagaaaactttctaaaaatcggtgcctgctgtgacccacacccttttctcataccttcccttgtagccctgggaaagaggaattcttcctttccatttttggagaaaattctgggatcctacactgggttcccattcaggggctgctctctcaacccccagtccccacccacggtgacctcacagcccccagggctacacctgtcacttgaacctggctgcctccctgatgacccacagctctgccctgacccctcctctctcggcccctatccacagggtgcctccacccagatggcccggcaaaaacaaaaccagcctggctccctgccttttcctcctcctgatgaggaggctgccacccccatcttcccatttatgtcgataacactcctggctggatgcagtggctcacgcctataatcccaacactttgggaggccaaggtgggctgatcacatgaggccagaagtttgagaccagcctggtcaacatggcgaaaccccgtctctactaaaaatacaaaaattagctgggcatggtggtgcacgtctgtagtctcagctactaaggaggctgaggcgggagaatcatttgaacctgtgaggtggaggttgctgtgagccgagatcacaccactgcactccagcctgggtgacagagcaagactctgtctcaaaaataaataaatagccaggcgcggtggctcacgcctgtaatcccagcactttgggaggctgaggtgggcagatcacgaggtcaggagatcgagaccatcctggctaacacagtgaaaccccgtctctactaaaaatacaaaaaaattagccaggcctggtggcgggcgcctgtagtcccagctacttgggaggctgaggcaggagaatggcatgaacctgggaggtggagcttgcagtgagccaagatcgcaccactgcactcgagcctgggagacagagtgagactccgtctcaaaataaataaataaataaattaattaattaattaattaattaaaataaataaataaataaaataacacccctgcccaaaaacaacccccccacccgtctcccctgccccgcgcccagcttctatctgtagctgcatttcagccgggcattcagtagaagctgtgggactgcatgactggggcagagcctcagtgtgctcatctgtaaaatgggaagagggatgcctgcctcacagtagcaagacctcatagtgctgccgtgaatgttcagccgatgagacagtgtgtgtagaacgccaggctcacagtagctctcaacagataccagtgtatgcattctctccagcctcagtttcttcatttgtagaaggggaactccaatagtacgtatgtcgcagagttgtcatggagatgcctgtagagatggggtttagccatgttgcccaggctggtctcaaacttatggactcaagcaatccacttgcctcagcttcccaaagtgctagggttacaggcatgagccaccatgcctggctgtgtgtatggcttttctgcataagaaaatagcaataacaatgcacgccacagacataatgccgacggagtctcgctcttgtcgcctaggctggagtgcaatggtgagatcttggctcactgcaatctccacctcccaggttcaagcaattctcctgcctcagcctcctgagtagctgggattacagacacccaccaccacacctggctaatttttttgtatttttagtacagacggggattcaccatgttggccaggctggtctcgaactcctgacctcgtgatccgcccgtctcggcctcccaaagtgctgggattacaggcttgagccaccatgcctggccatcataatgctttatttattctgtcctgtgcatcatggcatggttccctcagattccactcaaaaatcagggtaattcagcaaactcgtattagcatcttctttggcagtggttctcacacttgagtgtgtatcaaaagcatctggagagcgtgttaaaacacagattgctgccgggcactgtggcttgcgcctgtaatcccagcactttgggaggccaaggcaggaggatcacttgaggccaggagttcgagaccagcctgggaaacatactgagactctcatctctataaaaatgttttttaaattagctggatgtggtagtgtgtgcctgtagtcccagctactcaggaggctgaggccggaggattgcttgagcccaggagttcaagtctgccgtgagccatgattgtgcctctgcattccagcaagacctcctctcagaaaaaccaaaacaaacaaaaaacacacacttctgggccccactcctagagtttccaactcagtaagtctgagtggagccccagaatctgcatttttaacaaattccccagtgaggcagatgctgctgttccgaagaccacactttgggaagcattggtctttaggaagtgctggatgctgggcacagcagagtggcaccaatgcagagaaggaggtagtcgtgatgtggcaggaatggcaccaggctgggctgcaagaggacccagacctgccattatcagccagcacccagaaacgtcactttgcctctctgaacctgttttctcatctgtaaaagaataacaatggctcactcataggatgattgtgaaaacaaaggttaatggccacacagagaaaggtgactagcttgtcatctgctgcaggcatgtgaacaccaactcaggcaacagtgtcaggacgggagaaggtgccaagaccgaaatgtcactgaggatgacagaaattctaaatgtcaaactcccaaacggaggcgggaagaataacctgactgctgagtgtgtcttaatgtcttgatcagacttcctgtgactttgagctctgaataaacatttttatattttcaccttttgccgttcatatgcacacaaggcgaaaattggcatgctgattttttttctttttttttttttgagatggagtctcgctctatcacccaggctggagtgcagtggcgcgatcttggctcactgcaaactccgcctcccgggttcatgccattctcttgcctcagcctcccgagtagctgggactacaggcacccgccacaactcccggctaatttttttttgtatttttaatagagatggggtttcaccatgttagccaggatggtctcgatctcctgaccttgtgatccacccgcctcggcctcccaaagtgctgggattacaggcgggagccactgcgcccagcctttttttttcctttttgtggagacagggtctagctattttgcccaggctggtagaaagcagtcctcccacctcagcctcccaaaatgctgggattacaggcgggagccatcgtgcctggccagtatactaacttttaaaaaaatctactaccacatgccccttgcttcttcctttttcttaggaagatgctgattttggttcaagtgtttttttgattgtctgccacttttccagacctcggccatcatatcactcaagagtacagggttttacctaggatcaagagagagacagaggcatggcgtggtggctcatgtctgtaatcccagcactttggaaggccaagatgggaggatcccttgagcccaggagttcaagaccagtctggagataaggagactccatctctacaaacaataattattttaaaattagccaggggtgatggcatgtacctgtggtcccagctactcaggaggctgaggtggaagggtcacttcagcctgggaggttgagttgcagtgcactgtgcttaaaaaaagagagagagagacattcaaagacagagggtgtattagtttcctatttgttaaaagaaacacaagacaaattaaatttaatagcttagtggagcaaagaaccattagtgaatcaggcagccccttttacccaaaccagaataggttcagaaagactcaggagctgccacatggttgaacaatatttacggacagaaaaacgaaagtgacccacagagcacggaagcgaggctcagaaacagctggattgactacagctcggcatcggcctcatttgaacatggtttgaacagttggctgcctgagatcagccaaaacagtgcttggtataaaagtaggtcacgggctgtttacacctccagttaggttacagtttactatgtacgaaaaaacctttcagccgaacttaaaatacctaaggaggcagctgtggggtaaacttaatataacacattgctgctgtaacaaatcactacaaacttagtgacttcaaacagcacaaacttattacttaccagtttgcaagatcagaagtccaaaatatgaatcttacttggctaaaatcaaggtgtcggcaaggctgtattccttctggaagctccaggggcaaacccattccttgcagcttctagaggtgcccgcattccttggcttgtggccccttccagcaacagcatcactctgatctctgctgccatcaccacagtttccctgactcagaccctcctgcctccctcttataaagacctttgtattactggaaagtggtcccaatccagaccccaaaagagggttcttgaattttgcctgagaaagaattcaaggtgaatccataaagtgaaagcaagtttattaagaacgcaaaggaataaaagaatggctactccatagacagagcagtcccaaaggctgctggttgcccatttttatggttatttcttgattatatgctaaacaaggggtggattattcatgagttttcagggtaaagggtgggcaattccctgaactgagggttcctccactttttagaccatatagggtaacttccaagcgttgccatagtatccgtaaactgtcatgacgctggtgggagtgtcttttagcatgctaatgtattataattagtgtataacgagcagtgaggacgaccagaagtcactctcgtcatcgtcttggttttggtggggtttggccagcttctttactgtcacctgttttatcagcaaggtctttatgacctgtgtcttgtgctgacctcctatctcatcctgtgacttagaatgcctaacttactgggaatgcagcccagcagatctcagccttattttatgcaacccctattcaagatggagttgctctggttcaaatgcctctgacacttgtggttacattgggcccatctggctaatctaggataatctccccatctcaagatcgttaacttaatcacatttgcaagtttccttttctgtgtaaggtaacatcttcacaggtttgggggactagggtgtggtcatctttgggagaccattgttctgcctaccacagagggctgatctcattttgaggaagaaatcccttttggttggagtgataaagggaggattcgatggcagagaacccactgagatgggcctttggggctggattggattctgcaagaaggatgtgggaagggagagccctccagatgaggggcaggtgagaagcaaagcccgggagatgggaaagtggggggcaggtgcagggaactgtgggccattcagtctgaccatagcacagggagagcagcacgggggaccactgggggccaggccagggcccaccctcactctctttatgaagcagagatccaatatacctaactcttgagtttgggaaagtgacttcacctctctgtgcctcagtttactcatctgtaaaatgaacagtacccgccttacaggctagtggtgagaaccgaattaattaacgtgtggaaagaatgtgaacagtgcctggagcagagtaaattgcctgtaagtaattgctgtcatttaagaatgtgaaattgacttcgtgagggtagaatgagagcccaagccagggtgggcaggagatggaatgaaatctcctcttctgtctacttcagacctcttaggttcttcaaaggctatgtcaaattccatctcctgaaggatcaacatcagaatgttagtgattgtcttgtaaatcaatgaaaatgaccaagatgagtgtcaatcattttagaaggtttatttgccaaagttaaggacccgtgtctgggaggcaggtccatgcccttctctgaagatgattttgaggccttggatatttaaaggagaaagggcggataatggaagaagatgaagaaatttttttaatgtgtgggtggataagagacaaacagttgcatccttttgagtctttgatcagccttttactgaaaacaccattttcgtgtgaggcaaggtagaggagtagtcacttatgcattcatctagctcagtgaatctgcatttttacatgagattacataaatatagcggagaggaagcaattacatatgcatttgtctcaggggagcagagggatgactttgagttctgtcctttgtcctgtacctgtaaagataagctctgtcctttgccctgtacctgtaaagataagctatcagctgggcgtggtggctcatgcctgtaatcccaacactttgggaggccaaggcgggtggatcacctgaggtcaggagtttgagaccagcctgaccaatatggtgaaaccctatctctactaaaaatacaaaaaattagccgggagtggtggcatgcacctgtagtcccagctacttgggaggctgagacaggagaattgcttgaacctgggaggcggaggctgcggtgagctgagattgcaccactgcactctagcctgggtgacagagtgagactccatccccccccaaaaaaaaagataagctataaatgtacaattgctagggagaaattcaacagaactgttttagggtaaagatctttggggcccacagggaatttccttgtgggccaattgtgagggaagtatgtagctttttatctttatagttattttatttatgaaccatgagaggcaggtttgagggacccagttcccaggactcttccctttggcttagtgagtttggggtcccaagatgtattttcctttcacagtctgtaagtggtaagattcattttcttctaggcaatttatgtcttcttccctcccttccttctttctttccttcttctttctctttttctctctttctccccttctccccctcccacttcttctttcttctggtatactgtattagctatctatactgtgtaacaaattgtcccaaaacttagtggctcaaaatgataacatttattgtatcataatttctataggttagcaatccagtatggtttagctgggttctctacttcaaggtttctcataatcaaggtattggtagagccgtagtcatgctaaggctccaccagggaaggtgacacttccaagcccactcatatggctgttggtaggattcagggccttgcagggtgttggaacctcagttcctccctggctgttggctggaagcctccctcagtttcctgccacattggcctctccatagctcacaaaatggcagcttgcttcatcaaggtgagcaaggcaagagacaggcagagagagaggcagagagagagacagagagagaattctattgtaaccttatgacagaagtgatattccagcacttttacttccttggttagaaggaagtcagtaggtccagcccatactcaaggggagagaattacacaagggcatgaacagcagagacgggaattactggggaccatcttagaagtctgtccaccatatacttttcctgtagtttcctaattctttataatgaatacatataactcttaatatagagacaaatattcaatacaaagataaaaatagaaaatgtaatcctaagccaggtactgtgattcatgcctgtaatcccagcactttgggaggccaaggcagcagatcacttaagtctaggggttcaagactagcctgcatgacatggcaaaaccccatctctacaaaaatacaaaaatcagctgggtgtgatggtgcacacctgtagtcctggctacttgggaggctgagatgagaggctagcttaagcccaggaggcagaggttgcagtgagctgagatcacaccactacactccagcctgggcaacagagatctcacctcaaaaaacaagcaaacaaacaacaacaacaacaaaaaaaacacaaacaaacaaaaaacacatgtaatcctaagtgtttctgtgaccttatgtggacggagttctgcctctctagggattgtccactgtgaatccactataatttattagctattcttttgtgggtatttagaccatgtttcattgttcacattacagaaagggctgctctgaactttcttgaacatgtctcctagtgaacacatgaaagagattctccagagtatctgcctagaagtcaaattgctgggtttggggctggctaataacaccaagttgggttttttttgtttttttttttttgcaaaatggttaatttcacactccagtaagcagtgtgttagagtttctgttgaatcgtgtcatttatagtgttatttttcaccaattgagtgggtataaaaccctatttctttatggtgttaaccttttcattctcttacttgttagtaaggtggagtgcctcttcatgttttcatgttgatttgcctaagttctttaaatagtctgcatgctaagcctttgttggttttatgttgtgaatatattctccttacattgtgcttgtctttttactttatattgtcttttgattaacagaatttattttcttttttaatttttaaattgatgttaattttttaaaaaatagaaacagggtctcactatgttgccctggctggccttgaactcctggctcaagtgatcttcccaccttggcctcccaaagcactgggattaaaggtgtgagccactgcacctggcctatttatttacatctagttgaattttttgatcttttccttcaggtttactggttttgagtcttgtttcagagaaagcataaatatgttatcctgtatcctcttctagagattcaaagttctgactttcacatttaagtctttatctccctccagctgatttttgtgtatggtgtgaggctgggatcaatttaattatttttccaatttagtattttctatatgaatgagcaattgctccagcaacatttatgatatagtctctactacctccagccatctgcaagcctatttctgtcatagatcaagttgtatgtcctttaagttttatccttcctttgtcttggcctgagccattaaaaccccatcttaagttccatggctttataggaagtcttatacctggttgagaaagtgcctcaccttttactactttcctttacaagtaccttgaccaacttagttcctggatttctcgtgtagatttaaaaatcaacttgtcaagttccataagaaaccctaaaattccattgaatatataaatccattggagagaattcatacctttacggcaacaaggcttcctaaccatatacatagtatttctatttatttggatcttctctaatggctttcaataaagtttgaatattttcttcataaaaatcttacacattttgctagatttatcctaggtactttacagtattttttccttttgtaaattacatcagttttttaaaaattgttttcttcttaaagaaatggtttgctagaaaaaaagaaaaatatttgtttcctatttattgctgatgtatagaaatgtaatttattttttcctctttactttattagtcaccttattaaacttttgtctttttatttatttttaatttttaaaaaagtttaattcactcttttggagtttgcagacaactgtattttctgtcaatattggcagtttttttcttacttttcactctttatatcttttactttatgtctttttttctcttgctgcagtgcttagaatcatccacacaatgttaaaaagatgtgactttttgatcctaccacgttcctgatttttttttttttaaacagagtctcactctgttacccaggctggagtgcaatggcacaatcttgactcactgcaacctctgcctcccaggttcaaacgattctcatgcctcagcctccccagtagctgagattacagacgtgcactacccagttaatttttgtatttttagtagagacagggttttgccacgttggccaggctggtctccaactcccgacctcatgggatctgcccacctcagcttcccaaagttctaggattacaggcatgagccactgcacccagccccatgtttctgactttaaagggaaggttttcacattttccctgtcaaacaggacgttctctgtgggtcttttgttaaccttttatcaactatctacagaaaaaaaaaaatctgctttatcttcagtaatatttcttttgctttcctaatattttttctcttgatcaatgttgccagagatttgtcagttttattggtctattctaagaaccaacttttggctttattgatttgttttattatttcacagatttcttccaactttattttattttgggattttacattacattttctttttctattaattttcagcttttactttctttttaaaaatataaacatttaaggcataaagtatcacttttacatctccccaaaagttttgaaaatagtattttagttattgctcagtcctaagtattattacttaatttccattattaattgtcctttgacttgtaagtaattgagatgtctggttttaaatttccaaatgtatggtgcttttaaaaacatactttatactagtgacttctaacttagttacattatgatcagagactctgctacccatatattacctatgctttaatgtttgtcacactgtcattgacttgctttatggccaattacatagtcacttttttaaatgacccatgacccgtgtgtgctttgcttgggaaaatgtatatttgctacttgtgggatacacaattctatatatatcgactaaatcaactttgttaattatgttagcaaaatctgtatcattacttaatttttatctgcttaatctattgttgattgagaaagaagagttgaaatcttcaactctgatggtggttttgtcaacttcttttccctatgaatgtatttctattaatgtttgccttatatgcttttttttttttttttgagacacagtctcaccctctcactctgtcacccaggctggggtacagtggtgcaatattggctcactgcaacctctgcctcccaggctcaagtgatcttcccacctctgcctcctgagtagctaggactacacgtgcatgccacagtgcctggctaattattttgtattttttgtagagatggggttttaccatattgctcaggctggtcttaaactcctgggctcaggcgatctgcccaccttggcctcccaatgtgttggtatgagccaccatgcccagccttgctttatatatgttgaggctcttattagatgcatacaagtttagaatatcttctaggtaagttaaaccgtatatcattaggttgtaatcctctctattgataccaatgtgttttgtctaataattcattcttttgatattaatatatccatcccagctctctttgagttagcatttgcttaatgtatcttttatcctttttaaaaatttttcaacttttctggatcgttatattttagatgtgtttcttataatcagtatattactggattttgtttatttaatgaaaactctcttttaactggcaatattaatcctgttatatttattttgattatttactttttttttttttgagatggagtctcgctttgtcacccaggctggagtacagtggcgtgatctcaggttactgcaacctctgcctctcgggttcaagcaattctcctgcctcagcctcccaagtggctgagattacaggcacgtacaaccatgcccagctaatttttgtatttttttttagtagagactggcttttgccacgttggccaggccggtctcaaactcctaacctcaagtgatcctctcacctcagcctcccaaagttctgggattacaagcaattatttacatatttggatttgttctcaccaatcttttatttttatttgtccaatttctccctatgtggccttttctctttccttgcttttttggaaggcagttctcctattcattttcttattattgcattttttccatgtgtagaaatttataaatgctatttctattattttggtgaatatctttatttattttgtttcttaaagacaggttctcactctgttgcccaggatggagtgcagatgttgtggagtgcagaatcatggctcactgcatccttgacctcctggactcaagtgatcctctttcctcagcattttgagtatccatgactacaggcacaagccaccatacccagctaattgttttattttttgtacagacaggatcttcctatgttgcccaggctggtctcaaactcctgggtgcaaacaatcctcctgcctttgcctcccaaagcgctgggattataggcatgagccaccgtgctcggccaaagacctttaaaagtataggccaggcgcataaaagtttaggccaggcacagtggctcatgcctgtaatcccaacactttggaagaccaaggcagaaggattgcttgaggccaggagtttgagaccagcctgggtaacatagcgagactctgtctctacaaaaaattttaaaaattagctgggtgtggtggcatgcacctgtagtccctgctacttgggaggctgagacatgaggatcacttgagcataggaggtcaaggctgcagtgaattgtgatcacgtcactgtcctctaccctgggtgacaaagggagaccctgtctctaaaaaaaaaaaataagtttaactctaaaaaatctagagttaaacaatatcttaattcccattttaatcaaggacctcaaaatacttcaactctctcatcctcctgccaaattatattctgccttttttatcccacagtttttatgacttttttgtatacaatgttggtttagatttaccaaaatatttaccattttatttgttcacgattctttgttgcacttcagaccattcttatgacatcagatacctccatcctaaactacgccttcagaaattgccttggtgaaaatctgattttaaaatatcggtttttgttcatccaaaaatatctatattaagatatttttattatgatatttattaagatatcttaatataataaattatattaagatataatttattaataaaatattaatattaatattttattagtatcttaataaatatctttattaagatattttttgtacgagtgcacgattctaggttaacagttacaactgacccttgaataacattgtggataggactgctgacccccaatgtagttgaaaatctgtgtatacaggaggctgagggaggagaatggcgtgaacccaggaggcagagcttgcagtgagccaagatcacgccactgcactccagcctgggcgacagtgagactctgtctcaaaaaaaaaaaaaaaatagtaaatcttgtataactttgactctccaaaacttaactactaatagactactgttgatgggaggcttaccagtaacataaacagttgattaacagatattttgtatgttacatgtattatatactgtggtcttacaacaaagtaagctaaagaaaagaaaatcataaggaagagaaaatatatttactgttcattaagtggaagtggatcatcataagggtcttcagcctcgtcttcatgttgagtaggctgaggaggaaggggggttggtcttgctgtctcaggggtggcagaggaggaaggaaatcagagtagaagtggactcacgcagttcaaacctgtgctgttcaagggtcaactattttcccgaaatactataaagagatgacacaactgttttttggatgtcactgttgttgacaagtctgcttccaatcgaattgttatttcctcctagataatccgactttcctttctgaatgcctttaagatcctctctttgtctttgatgttcttcactttgaccactgtgtatgtgcatgtgtgtgtatgtttgtgtgcacatgaagaaggctaattctgggagatgtaccttatttctcatgagttcagcaatactttaaaaagtatattttatccatgatccagttgtttcttaagaggaaggtccttcagagtacctggtctgccacaattccagaagcagaagtctatgatgctttgtacatgcacaatcctgcgtgtgcacagtggcgtggtggaaacctctgggtggacacacccctccatgcctacatctgtgtgtgtgggagcctttagtgtgcccatccctctgctatttttctagttcaaatgcaaacccttcaggtcaggggattcgctttctgtcagtctcattccctcctgacaaccttacagtacttactccccacggtcagagtaagcactggctgctgtttggtttttacacctgttgggaaaaggagtatattagtcagggttctccagagggacagaataatagggtgtgtgtgtgtgagagagagtttattagggagaactggctcacacgatcacaaggcaaagtcccacgatctgcaagctggggaagagagaagctggcagtggctcagtctgaatttgaaagcctcaaaccaaggaagccaacaatgcagccttcagtctgtggccaaaggcccaagagcccctagcaagccactggagcaagtcccagagtcgaaaagccaatgaacctggagtctagtgtctaagggcaggaggagcggaaggaagcatccagcattggagaaagaaggcagccagaagccccagtgagcaaggtgatcccacctcttccacctgtttttgttgtagccttgctggcagccgactggatggtgcccacccatactgagggtgggtcttcctctcccagtccactgactcaaatgccaacctcctctggcaacaccctcacagatacacccagaaaaaatacttcgcatctttcagtccaaacaagctgacacctaatattaaccatcacaaggagaaatgctgggagagccatggctggcccagcccctcctcactgcatcctctgctttcccatgtgtcttgtccacagctctgcccctgaggactgcacgtccttcagcatcaacgcctccccaggggtggtcgtggatattgcccacggccctccagccaagaagaaatccacaggttcctccacatggcccctggaccctggggtagaggtgaccctgacgatgaaagtggccagtggtagcacaggcgaccagaaggtgagtgtcatagctgtggggtggcagtgtggatgggcttcagcagggcagccacacacactctgtcctgccgtgatccacagcaccagcctggcagagcctcttgccctgtggaagagctcgtgatggcttcttccagccatagtgtccttggggacaataatatacggctaccaggggttcatggaggtcagggtttagattaaactctattcagcaaatctttagtcagtacctaacacatgccagacactgctagacactgccaggcactgggaatccagaaatgaataagacagctgagggtgcagccctcatggggcttacaacctatgaatggtagcatcagagaatctactggtaaacaaacaattgcaaatgatactgagttctatggaggccacaaactggtagccccaagggatgctggtccatgctcctggatcggtttcctgtgtctggtatagaaaatcaccatggtggcctggccgggcacagtggctcacacctgtaatcccagcactttgggaggccgaggcgggtggatcacctgaggtcaggagtttgagaccagcctggccaacacggtgaaaccccatctctattaaaaatacaaaaattagctgggcgtagtggcgagcgcctgtaatcccagctactcaggaggctgaggcaggagaatctcttgaacccgggagggggaggtttcagtgagccaagattgcgccacttcactccagcctgggtgaaagagcaaaactccgtctcaaaaaaacaaaagaaagaaaatctccatggtttgcttaaaacaacagaagtgtatcctctcactgttctggggttcagaagtctgaggtcaaggtgccagcagggccagatttttctggaggctccaggggagaataattatttgcctcctccagcttctgggggctgtcagcagtctgatctgtggctgtctcactccagtctgcttccatggtcgcactgcctctgccccttctctgtggaatccccctctgcctctctcataagggtacttgccatgggatgtggggcccagctggatggtccagggtgatctcctcatctcaagatccttttttatttttttgagacaagagtctcgctctgtcgcccaggctggactgcagtggtgcaatctcggctcactgcaacctccgcctcctgggttcaaacgattctcctacctcagcctcccaagtagctgggagtacaggcactcgccaccatgcccagctaatttttgtattttttttagtagagatgggatttcaccatgttggtcaggctggtctcaaactcctgacctcaagtgatccactcacctcggcctcccaaagtgctgggattacaggcatgagccaccgcatctggtctcaagatcctcaacttagatctgcaaagactttttttccaaatgaaatcacatcgacaagttccagggattaggatatggatgtatctttttggggaccaccattccacctactacaccccctttgcctgtagatgggctcaacaggaccctctggggttcccacagatctctgggccaacagccacttattcccagcagaaccagccaagcaggcttctccctgggggaacacagagcttgactatccaggcaggctggggagggggtggtcggggaaggcttcctgaaagaagtagcaagctgaagggtgacacgaactacccacctaagagcaggagagaggagagagtttgacacagaggggcaggctgtgtgcactctctggatgagaaaagggtgagacacgtgttggggaaactgaggaagttctgtatggcaagaaaggtagatggaacaggaggtgaaggagtcagtttgaagagtttggtatcagggacctcattttctgcaaacaacaggaagccaacaaaaagttttcagccagcgaataacaagacagcatttgtactttagaaggatcccaatggctgtggcctagcaagtagataggatctagggagtgggtgggaggcagggagaccagacagaaggctgacaccatggtccaggcagaggcagtgatggccgtggcgttttcctggatttccactgtctacagggcaggtccgagcacctccgcgtggcccctcaggagctcctcttcctctggtggcagctctttggctctgctttggaaactccccaccgccattttgcttggatgtgtcaacccagatgctccaccctcctctggccaatccgaggtgttctcctaggatttctgaaccttgggcacagtggattggtgttttctcatctcttcctgaagaaacctccatccactcaaagctcctgctccccagatcccccaggacccggcctttccagggtctggttcttcaggtctttccttgatcccttctgcttgccagagtcagttctgtggcttatgatcagctctctctagcgcctcttctgccccatctccagctgctgggcccctactccctttcccagatctacctcaaagcacactccttcacaaacgaccctgccaggcagagtgtctccattgctgggcccccataggatgctcttctgtagcaccagtcattcaagctttttgctttccctccattcccatcggatggggccactccttacaggctaggaccagttcttgcccaactttgtctccccagtgccctaccctgagccggcacataggagggggtccagtgggtgtttgttgaatgactaagagaagtcattagtgatctgctctcccataggttcagatttcatactacggacccaagactccaccagtcaaagctctactctacctcaccggggtgggtaagtgacaaccaggatcctagagtgccgtctcatcccctgcccacctcctaatccctgcaggatgtctctgtaggagaaactacacctggagcttactttagactgagtagagaaaaagcatggtttctagccagtcagacatctgggagttcgaaatattccatccttagtcagtgaaccacaaagaaatacaatgtggcagtggtggtgcggggaattttaattatatcttaacattttgcttctcaagttaggaagtaggaacttggattttcaatatatgcatctccattaatttttttttttttgagatggagtctcaccctgtcacccaggctggagtgcaatggcatgatctcggctcactgcaacctgcgtctcccaggttcaagcgatcctcctgcttcagcgtccctagtagctgggactacaggcgcttgccaccacgcctggctaatttttgtatttttagtagagatggagtttcaccatgttggccaggctggtctcgaacttctgacctcaggtgatctgcctgcctcaggctcccaaagtgctcggattactggcatgaaccactgcgccaggccctctattcctttttgatacctcaaatatctataacaaaaagtagataatgacactgtcttatacaagaatatagatagtgttcctcaaattccattatttatatctcatcttcaccatttctgccatatcaatgatccacctatactcatatttatgtaatgttcttctttaaataaaatccattcttaaacttgacctcattttgaacaataatatcatgattagtatcattatgtgtattaaacatataagtagcagccagacatggtggctcacacctgcaatcccagcgctttggaaggcggaggcaggaggatcgcttgagcccaggagtttgagaccagcctgggcaacatagtgagatcctgtctctacaaaaaataaaaaaaaacagctgagcatggtggcatgtgcctgtagtcccagctactcaagaggctgatgtgggaggattgctcgagcccagaaggtcaagactacatgattgtgccactgcactccagcctgggtgacagagtgagacccagtctcaaaaactaaaaaatatatatatacacacacatatatatataatatgtagcatatagaatcttcaggtttcatttcattaatgcatttcattcattaatgcatatttaagtaataatactacagcacttactcaattgccaggcactgtgctaagactttacatttaatccttacaacaatccagtgaaattggtattattattatcatcccattttacaggtgaggaaactgaggcacaagagctaaacagacttgtccaaggtcatgcaattggttagtgaaggagtcaggaagtccaggccacgaaaggacaatgcttccccggccctaactaagacgtggctatgaatatgtttagaaggtcatctgggtcagtctcatgtgggacaagggtcaccatatcatgctgtggggcacacggatctattttattggaatgaccttgcagtcatatattcggatgagggaggaaggatttacaaacaaatgtttgctttctcagccaagccatttggacagagtgggggcatgttcagggttgcaatttgtccccagatacagtcacaacacatgtcatgaagagcccgtggggctggtgtcaccgctgggtcccccaccccaaggtcactgagggctggggccagagtctttcgagaggctggcagggtgtgcctgcagaggcttcacatcgaacctctcattgtggtggttgggaattccttccaaaatccctgggggtggccagacgtgcagggtctggtggacatcacagttgtggccccgctgaaggggaacaggtgtggtcagaggccccagctctgctgtccgaactgtagccagacttcctgggggccgtggaggagggatgtcttgaacctgtgtctcctctgaaggacgggaagaggggctcacactatgggtgcacacagtcccctggggaaacgacctgcccattcagggccaggctgggtgccccaaccccggaccctcaccaacctctcctcttacttgatgggatttcagaaatctccttgtgcgcagacatcacccgcaccggcaaagtgaagccaaccagagctgtgaaagatcaggtaccactcacccaaacgctcctttcctacttctactggattctccccgggcgcccccttgtggtgatggggcaaatgctggcctgtcccacgtattccgtgttaactgttaaaaaaagaaagaaaattagcatcaccattaatattttggcttatgtatttcccatctattttacaaaatcagaatttcaccaattgtgggttcagatgtgttatcctacaaactggaaaccctactgagtcacccagttaatacacagcagagaggaaattcgtgggcaggtctcgactctggctcaaaaactccctactccatgctctacagctgatatgggagagatttctgcagagctgtctacatgggggaataacagagaaaggaagaaatggcagggggagaggcgggaaggagccaggtggggagagggagggtgtgttgtggaaagacaggatgatgggatgtgcagaaagggcaggtgaacgctgtcttaaaccagagtctgcaggtaaacctgaaaccccagagctgcctgcaccattttatgctggtgtgcactgggggctgtgccctgtaaaaagatgaagatcctttgtggggtcagcaaaagtgggaagacaaattacaactctaggagtagaatctgtccctgtatccctcccgaaatgcagtcatttcccaggggcaaacgctctcccgcgaagggaggcgccatcactattagatccctacagggtggggctgcttaatgtgctttaatctctaggcagatattaactggctgctaagaatagtaccacactttgctgaatgagtaattaagagttcacataatagtaactatttagattagaatattgacatacatatttagctgcatttggtttgtcaagctcaacattttatttatttatttatgtatttatgtatttatttatttatttattgagatggagtcatgctctgtctcccaggctggagtgcaggggcggttcaccgcaacctccgcctcccaggttcaagtgattctcctacctcagcctcctgagtagctgcaattacaggtgcatgcctccacgcccagctaatttttgtatttttagtagagacagcgtttcgccatgttggccaggctggtcttgaactcctgacctcaggtgatctgcctgcctcagcctcccaaagtgctgggattacaggtgtgagccactgcgcccagccaacatttcttaaaagctgttaaaatccatgtgactgtcttgggctcctttttttaaatggatgaattgtgttttgggtgaatttggttgtgacttttggagtaaaaggcaaaaatccactcctgagatcaaataattaattgatgtggaagcaagatgtgtaaactgcactgggttaaagaagtgatgggggccgggcgtggtggctcatgcctgtaatcccagcactttgggaggccgaggaggatggatcatgaggtcaagagattgagccatcctggccaacatggtgaaatcccatctctactaaaaatacaaaaattagccaggtgtggtggcatgcgcctatagtaccagctactcaggaggctgaggcaggagaatcacttcaacctggggggtggaggttgcagtgagccaagatcacgccactgcactccagcctggcagcagagggagactccgtctcaaaaaaataataaataaataaataaattttaaaaaagaggtgatggggagttgctatgcctcttgcaagagttggagggctctatgctagtttctgagcatgactcttccctgctggtgtccagaggacctggacctggggcccttgtggacagggtgccatcctgctggtgaactgtgacagagacaatctcgaatcttctgccatggactgcgaggatgatgaagtgcttgacagcgaaggtaaagagcatttgctagctaacgggaagggctttttataaagcccttttgcccacatagcctgaacctggtgacggccctctgaaataagggttattgaaagcatcttcttgttggcaaatctgttttataggtgaagcaatgggcaaaggccctcgggggtcaagtgacctccccaagctcacgcagcggtcagggaagagctgaggccagtgctgtctcctgatgcctcctacaggccctggtttccatgcctcaccctgctgcccaacctaaacgctcttaggtcaaacctggagcctgaaatccttcgaaatgaaagcttttcattcccaaactcatatcagagcaggccctgagacctctgccataggccgggcacgactctgaccactttggaatgattaactcatctgatcttccaacacaaacctttataggtaggaaaaccaaggcacggggaacttaagcaatttgcccaaggtcacagcactgacacgtagcagactcggggtttgaaccccggacgtcccaacaccggagcaggtttagaggcatgaggatggtggggaatgcaggatctctgcaggcaaacctctgggctgctaagggggtggctccggggttgaagtgaggaaacattatccacctgcgctggaggaaggtgctaaggggctctggctggcaggccttcctggggagctcttagaataacatagaaatggatgtattttcaagttgcatgtagttggcctggcccgatgccaggggacagcctctgtacagtgcctgacatgcggtaataatcacaacagctgtcctttgtgggcactcccggggtgccaagagctggtataagcactgtgtatcacctgactttatcttcacaaccattctacggtgggtacaactcttgcccctgtcttagtgatgaggaaacagaggcagagaaagctgaaatccgtttcctaagcccacccagatcccagattcaaaccaaattgaccgcaaagcctttaagcccttggctatcagtcagtcccttgggaaccatctcttcactctccccaccctctaccccttcttggctattgttcaagttggttcacaaaccccacttcttgctcaggaccagcacagaaacctttcactcgttcattgcacaaatctcagccgagcgcctgccgcctgctggtcattgttctagggagttctcggctttctaggttcaagattcagggaacgttgcaaggagcaaaatattaataaatgtggtccccgctttgctgaggttacatccccagctcatcctagtgggaggagaccaaaaccttaatgagctctcattccaaaatgaaaaccatcatttaaatactcaaaatagcataaagaaaagaaaaccaggcaacatggtaaagggaggtctcaggggagcggtggggtgtgaggctccaccaggaggtgaggtggctatgggaaaccagcagcggtctcagggccctgtgactcaggcaatgcccttctcatcccagacctgcaggacatgtcgctgatgaccctgagcacgaagacccccaaggacttcttcacaaaccatacactggtgctccacgtggccaggtctgagatggacaaagtgagggtgtttcaggccacacgtaagtcatccccatctttgttcccctcctgccctggccaacggggcacaatcctgtcacacagctgtgtggcagataaatcctgagcacctactatgtgccaagttctaagaacagcagacgcagcagtgggcaagacagacgacatctcgtctactaccttccagttggaggacacagacaaaatgactcgttattgctccctgcttttctttctctctctctcacacacgcgcgcgcacacacacacacacacacacacacacctcctggttatagactttgagtgcaagctgacagcatgtggcatgtaatcatttgttctgcaacatcctgctaatcagagacatcaggaacttctcagtgacccacgagcacctgcaactaagtaggtgccaggttgatcccaggcacggggcacagagccatgactgtgaccgagtccctgccctcgtgttgctttcatcttagtggctgggagaactataggtaaaataattacataaaacacctagtgtgtccaacgctgtgacatgctatgtagaagaatgcggcagggaaggggatgtggagtgaggagtggagttcgggttgtgtggagagagggtggccagggaaggtgtcccccatgaggtgccatgtgagcagagggaggtataggaacagccagacagacacctaggggaagggcgttccaggcagagggaacggcaagtgcgtgggccctgaggtgagatcatgcctgtggtttggaggaatgcagggaggctagtgcagctggggcggaatgtgcaagggttaaagtgggggatgagggtggaagagacagggcagaggggaagggggaggtcaggtaggcgtatattgactttggcttctggatggaaggagatggagagcgccatgggagggttttttttttgcatgggcctgacaatcattctgatcctgatcattctgcctggtctattccaagctttttttttttttttttaatttttttttttgagagagtctcactctgttgccccggctggagtgcagtggtgccatcttggctcactgcagcctccacctcctgggttccagagattctcctgtctcagcctccccagtagctgaggttacaagcatgtgccaccacatccagctaatttttgtatttttagtagagatgggatttcaccaggttggccagacaggtctcgaactcctgacctcaaatgatccacttgcctcagcctccccaagcactaggattacagacaccatgcccagcctctgtttcttttttttttttttttgagatggagtctctctctgtcgccaggctggagtgcagtggcgcaatctcaactcactgcaacctccacctcctgggttcaagcaattctcctgcctcagcctcccgagtagctgtgattataggcatccaccacaatgcctggctaatttttttgtgtttttagtagagatgggctttcaccatgttggccaggctggtctggatctcctgaccttgtgatcctcctgcctcggcctcccaaagtgctgggattacaggcgtaagccaccacacccggcctgtttcattcttaaagtgattaaactgacactgatttggtgacaggtcaacttattgcctccacccaggcatcacctcctccaggaagttctcagggattccctctatcacagctgtctgctattttcatgatctctgcttctccctactcacccgtaagactgtgcactctctgggggtgaggataggaggacagtgactctgtctccctggtcccctgctgtgcccctgtcccccgctgacatctggctagagcagatgctcaggaatgagtgaaggaatggtgtatactggacttcctataaagtttggaatagctcaggcacccctgccacacccttctgggacttcagccggggagcagcgtcccagctagaacttcagtccttttctcctaaggggactggccagatttggctgcaaggggttctctgatggtgccatgtggtgaccctgggaaaggcttctggggagcactaaggagaggaggaaaagtcttcagaagtggggacgcagacctgagtctcccctgcctctctcctagggggcaaactgtcctccaagtgcagcgtagtcttgggtcccaagtggccctctcactacctgatggtccccggtggaaagcacaacatggacttctacgtggaggccctcgctttcccggacaccgacttcccggggctcattaccctcaccatctccctgctggacacgtccaacctggtaggccgagaaggcagccctgcatcgggggcctgggcttccaggcagtggcctggctagggaaaggggtacagagcccagctgggcagggggactccaaacagctgcaggaagtggtaggtgctgggccctggcagcggtgacagcccctccttccccttaccccctcccctgcaggagctccccgaggctgtggtgttccaagacagcgtggtcttccgcgtggcgccctggatcatgacccccaacacccagcccccgcaggaggtgtacgcgtgcaggtgagaggtcctggggtgctggggtgggtccagacaacaaagagcctgagttccatccgcagcactcactgtgtgatgggaaaaacagtcacccctcccctgcccactgagagcttgctgcttgttgggggctctaaaaaggcagggaagttccctactgttgttgtcattgcctctgtcctgccctgatgcagctgaggctacgttaactcccaggggcctgtagagtgtgtcccatggaccttgtgcaccagaaactcctgggaactcatttaaaatgcacctttctgggctgggcacggtggctcacgcctgtaatcctagcactttgggaggctgaggcaggtggatcacttaaggtcagaagtttgagatcagcccagccaacatggtgaaaccctgtctctactaaaaaatacaaaaattggccgggcgtggtggcgcatgcctgtaatccagctactcaggaggccgaggcacgagaattgcttgaaccctggaggcggaggttgcagtgagctgagattgcgccactgcgctccagcctgggcaacacagtgagactccatctcaaaaataaaataaccagcctggccaacatggtgaaaccccgtctctactaaaaatacaaaaaattagccaggtgttgtggcatgtgcctgtaatcccagctactcgggaggctgaggcaggagaatcacttgaacccaggaggccaaggttgcagtgagccgagattgcaccattgcactctagcctgggcgacagagcaagactccgtcttgagaaaattaaaaataataaaaattaaaaattaaattaaattaaattaaatttaaattaaataaaatgcacctttctggctgcctgtgagctgctgggtcttatccctgaggacggggcccatctgcattttggggaggcccaggcaatcttcctgcagtctgagagccgctgacaagtgtgctggggtctcaggagaccctctcctcccctcttctgatagcttcaggggcagaagagtaagagggtaatgtggtcaggacgcaggctggaatccagtgaggactgtattccggtcccagcactgttccaggtggtgtgaccttgaacagtgaactcatattctgtcttctcccaagttgatatggtttggctctgtgtctccacccaaatcttatcttgaattgtactcccacaattcccacgtgttctgggagggacctggtgggagataatttgaatcatggaggtggtttgccccataccattctcatggtagtgaataagtctcatgagatctgatggttttatcaggggtttccacttttgcatcttgctcattttctcttgccgccgccatgtaagaagtgccttttgcctcccaccatggtgtccccagccatgtgggagtgtaagtccaattaaacctcttttccttcctagtctcaggtatgtttttatcagcagcgtgaaaatggactaatacagtaaattgataccagtagaggggggcgttgctgaaaagatacccaaaatgtggaagcaactttggaactgggtaacagacagaggttggaacggtttggagggctcagaggaagacaggaaaatgtgggaaagtttggaactttctagagacttgttgaatggctttgacaaaaatactgataatgatatgaacaatgaaatccagactgagatggtctcagatggagatgaggaacttgttgggaaccggagcaaaggtgactcttgttatgttttagcaaagagactggtggcattttgtacctgccctagagatttgtggaactttgaacttgagagagatgatttagggtatctggcagaagaaatttctaagcagcaaggcattcaagaggtgacttgggtgctgttaaaggcatccagttttaaaagggaagcagagcataaaagttcagaaaagttgcagcctgacaatgcaatcgaaaagaaaatctcattttctgaggagaaattcaagccagctgcagaaatttgcataagtaacaaggagattaatgttaagccacaaggcaatgaggaaaatgtctccagggcatgtcagaggtcttcatggcagcccctcccgtcacaggcccagaggcctaggagaaaatggtttcgtaggccaggcccagggtccccatgctatgtgcagcctagggacttggtgccctgcatcccagctgctccagccatggctaaaaggggccagtgtagagctcaggctgtggcttcagagggtggaagccccaagccttggcagcttccacatggtgttgagcctgcaagtgcacagaagtcaagaattggggtttgggaacctctgccttgatttccaaagatgtgtggaaacgcctagatgcccaggcagaagtttgctgcaggggtggtgttctcatggaaaacctctgctacagcagtgcagaggggaaatgttggtttggagcccccacacagagtccctactgggacaccacgtagtggagttgtgagaagagggccactgtcctccagactccagaagggtagatccactgacagcttgcaccgtgtgcctggaaaagccacagacactcaacaccagcctgtgaaactggcctaccaggagggaggctataccctgcaaagccacaggggcagagctgcctaagaccatgggaacccacctcttgtgtcagcatgacctggatgtgagacctggagtcaaagatcattttggagctttaaaatttgactgccctgctggattttggacttgcatgggccctgtaacccccttgttttggccaatttctcccatttggaatggttgtatttacccaacacctgtacccccattgtatctaggaagtaactagcttgcttttgattttacaggctcataggaggaagggacttgccctgtctcagatgagattttggattgtgaacttttgggttaatgctgaaatgagttaagactttgggggactgttgggaaggcatgattggttttgaaatgtgaggatataggatttggaggggccaggggcaggatgatatgctttggttctgtgtccccacccaaatctcatcttgacatgtactcccataattcccaagtgttgtgggagggacccagtgggagataatttgaatcatggtggcagtttctcccatactgttctcatgatagtgaataagtctcatgagatctgatggttttatcaggtttttctcctttttcttcttcctcattttctcttgccaccgccatgtaagaagtgccttttgcctcccaccatggcctccccagccatgtggaactgtaagtccaattaaacctctttttcttcccagtctcaagtatgtctttatcagcagcgtgaaaacggactaatacacgggtggaaggggtacccactagttcctgcctcataacttgttagatggattccatgagctaatgcctgctaagagcagatggaccggacgtgccaggagcctctgttcaggccacaggtgacccctgagccacctgtgtgtccctcccaatccttccaggctgagcttcaaattccagagcactaaggagctgcttttctgctctctctagtatttttgaaaatgaggacttcctgaagtcagtgactactctggccatgaaagccaagtgcaagctgaccatctgccctgaggaggagaacatggatgaccagtggatgcaggtatgtgccctgcggggcaggcagggtgactgtccctgagggccaagagacacttgggggacccgggctcctggggttcagcctggtgcctcaccggccactcttccttagatggacagggagataggaacctgagagatccttgggccgggaggctcaagcaagtgattcatctgacgtttgctgtgggccactgcaggcccactgcagtcaccaagatgaagccaccttcctgcttgaaaacactcaggtggcctcaggaaatgatgtgaagctcaggagattggtgctcaaccagcccctcaagtggtcctccctccaggctgtccatcttgggcccagccaccaaagcaggtcacaccccagctccagcactttccatggctcccatctcctcctgcttagtctgtttccaggccctctcagcctgcctggttcccttccctggggccagcctgccactgtgcctggaaacacatgattaccagtctctgtttccgtgccactcccccatcatgccaggagtgccccaaggactgagactgggcctcatccagcctagcaccctgaccctccccaccactgccttgctttgcctcgggaccctgtccttccatgccgcacccctgcggtgctgtctcttggacccatctccccattcccatcccccatctccaatccataccggtgaatcccagcacaaatgctcctcgtccataaatttcccccatcacccccagcaggaattcatccctctttcttttcacccccacacaacatcctttcttcctttcttgccattccatcttttcttttcttttttttttcactcttgttgcccaggctggagtgcaatggctcgatctcggctcatcacaacctctgcctcccgggttcaaatgattctcctgcctcagcctcctgagtagctgtaattacaggcatgtgccaccacgcctggctaattttgtatttttagtagagatggggtttctccgtgttggtcaggctggtctcgaactcctgacctcaggtgatccacccacctcagcctcccaaagtgctgggcttacaggcatgagttactgcacctggccgccattccatttttttgataccaagttgacctgtgtgaaattgctgatatgtgccatttttgatttgcaagagtggaactttcatctggttcatcctaatagtaacttatagtagtgattatgtccaacatcacacctgcctgctagaatacaagcctgcggaggcggaattttcagcagattcatttctgaaacctccccgtgctcctcctgctgctccagtggcccaggctgggtcttatctgccctcctttggggaggaggccgcgagctctggcgccaacaggtcttctctggcccatcctagctgcatcaggagcccctcctctgtgtccccacagacccctcaacccctcaccccccatcacctcctaaccctggtgcccactgcctggctcccttgttttctcaccttgaggaggggtctcagttttgctcaccaggggtccccagcactggcccaggcaccaccaggagtaggagggaagggcactcctgcaggctcatggcctctcgtgcactgggcaaacagggggcaataagctccgcttctgagccccttctctgagatcaaacatcccataggaatgtgcccttgactgcaagggtgagagtgagtggatggtttcatgcccccatcctggcgtcgggcaccaagacccaggcagcacgcgcaacagcctcctctccactcactcccacaggatgaaatggagatcggctacatccaagccccacacaaaacgctgcccgtggtcttcgactctccaaggaacagaggcctgaaggagtttcccatcaaacgcgtgatggtacctgcatggggtggggagggggcacagctgccgaaaccctcttgtcttgagactccctccttttagcctgccttccccgcccgcgcctgtagctgagtagcccagtgcaaggaggtggaattcctaccaaagtgggagcatgtaggtggggcttgttatttttttattaccaagataagatctggctcttcatttcccaaaacccttgtcacccgtgagctcagcttgatctccaggtaaccctgccgaggaggtggctcaggcttggacctccctgtgctcttgaagaagctcttgctgcaaggtggaggtggggccggggctggaatctttcccaatgcccagctggaggctctgtcttatgggtggtgtttggtcttcaggggctccatctgggatatgggggattttgggatcagtggatcagtggtcatttcctgggtgtgactttatcagccacaggctgtccatgtggaggtgggaagtgacgtattgctgactcatgcttgactagcctggcaggttgatgcaaactcagcacagaacaataataataatagttgcatttattgagaatgagttgtgtgttagccagtgctgcattctttacctgcactgactcatttaatttgataaactgttatggagattctatcaataggcccattttatagaagaagaaactgaggctcagagtggagaagttggaattcaaacccggccagtccggcttggtgagcatgcttttccccgccctgcctccctctccctgctttcccaggaagaccccaggcctgcgctctgagtcctggcagccccttggctcaaggtgcccagggaaaacgacggaaggagtgtggggtccaaggtttgctaggacaaatggctttccgacaagcatctgtactgtgccccaagggaggggagagtggccctgcccacacagaaggcttcagaatgaaacttcagttaaactcaacaacttgtcccgagtctcgcttcctcctggccaagctgtgcgctgagcagtggagatgcagagatgctgttggattcacagtgtgtactcagccatggggtcgagttcatcctgtttcagcagcgttggggcgaaccagccagctgctaccgtgactttgccctctttctgctgctttcagtcctgcctggttcagtggctgtgtctactttgatgctccaagtataacaaaggccagattttctgatgccacaagtcctgctggacagacagacggacacctcggcaccattgttgtcccctttcccacagacaactttggatgaaggcaggcagcactggtccctcagctaagcacatctgtgtattccaactcaaatcactcagaatgaggccaggtgtggtggctgacacctgtaatcccagcagtttgggaggccaaggaggatggatcacctgaggtcagaagttcgagaccagcctggccagcatggcgaaatcccgtctctactaaaaatacaaaaattagctgggcatggtggtgtgtgcctgtaatcctatcttctcaagagtttgaggcaggagaatcccttgaacccaggaggcagaggttgcagtgagccgagattgcaccactgcactccagcctgggtgacagagcaagactgtatcaaaaaaaaaaaaaaagaaagaaaaagaaaaaacaacaacaaaaaacacccaaatcactcagaatgaagagaattggagaaaaagtcacactcagcaccaggctttggccccacctgcctctccagcaccattgtaggccactctcgctgtcccttacccagccccacctccactggcctccttcctgttcttcaaacttgcctaacgtttccccacctcacggtctttgcatatgccgttccctctgcttgcagtgctgttccctgttcacggggctggctgcttctcagccttcaggtttcagcttctatttcctactcagtgaggccttccctgatgctaaaagagggatccctactcccaccccaactcctagccttctccactacagccccctgttgacttcttcagtgtattttgttaaaatcatggactcgttcatctacttttcgttgcctgcgctgctgggcctgaggctgttatgccttacgctgtccatcgggcagctggcacaaagcttcacacacagtggttgttcttcctgtaagcatcgtcagtaaattttctatcaccaccatcaatgggaaaccagcagcacttcctgcagatagaaggcaactgtgaagttaaacagaatgaaacaagatcctgctaccaaagccagctcgttacaagtgactgcagcatctctgagctcgaggtcagctctctgctggttaaaatgagggattagcaggtgtcaaggatgtgtttgcatcactgaaacttgaatttttgaggaaccagaaaagactggaggaaaatgagaagggcaacagctttccaacgttgtgcctcaggccgcatcacctggcatccatgagcgtcccccacacagcccactcttggggggccacttctgcagactatggatatgccttcatttgcctgcagaaatccaaggctgaaggctgtataactgaccccctctcacaacaacagccagggcagtgatgtggctgaatttacattcattcatcaaacactgtttgaacacatactcagcggggccttgttctaggcacttgagatatgacagggagcaacgccaaggtccctgacctcacggaggggacgttctggcccagagagacagacagcagacaatgaatagaacaaagcagttatatggttccttagaaggggatgtcaagagctacaggtgccaggtgtggtggctcatacctgtaatcctagcactttggaaggccaaggtgggagaattgtttgaacccaggagtttgagaccagactgggcaacataatgagaccttgtccctacaaaaaaaaaaaaaaaattgtttcaattaactaggcatggtaacacatgcctgtagtcccaactactagagaggctgaggtgggaggatcgcttgagcccaggaggtcaaggctgcagcgagtcatgattgcacttctgcactccagtctgggtgacagatgagaccttgtcccagaggaaaaaaaaaaaaaaaaaaagagctacagggaaagacagagtagagcggaatggaggggctcataggtgccagcgtggtagggaaggtggattaggttacattcttaaagccgagtctggtggctcattccagtaatcccagcacttcgggaggccaaggctggtggattacttgagcccaggagttcgagaccagcctaggcaccatagtcaaaccctgtctctacaaaaaaaaaaaaaattaaaaataaaaataaaaataagccaggcatggtggtgcatgcctatagttccagctacttaggaggctgaggtggcaggacccttgaaccctgaagggtgaggctgcagtgagccatgatcacaccactgcattctggcatgggcaataggagtaagacctggtctcaaaaaaaaaaaaaaaaaaaaaaagattgcgttcttaaataggatggtcagggtgggcttcacggagaagctgaccttgcagcagatgcttgagggaggtgagcgagttggccatgtgagtgggtgtctgggtgaagagtgttgtaggcagtgaaacagccagtgcaaaggccctggggcaggagcatgccttgagtgttccagaacagcaagagggcctggaggggtagagcagagcaaccaggaggagaggcagtcagagaggagataggaggtggtagaaaaggcagtcagggagctgatgggaggcagtaggagaggcggtcagggaggtgatgggaggtgggaggagaggcggccagggaggtgatgggaggagaggcagtcagggaggtgatgggaggagaggcggccagggaggtgatgggaggagaggcagtcagggaggtgatgggaggtgggaagagaggcagtcagggaggtgatgggaggtggtaggagagactgtggtcagagaggtgatgggaggcagtaggagaggcaatcagggaggtgatgagaggtggtaggagaggcggtcagggaggagatgggaggtggtaagaggggtggtcagggaagagatgggaggtggtagcagaggtggtcaaggaggtgatgggaggagatggggggcagtagaagaggctgtggtcagaggtgatggggaagggacgggatgaccggatggggttgggcttgttggctactgttaaggctgcttgtttagaaactgagaatcatcacagggtcttaaacagaggaggattatgatctggtttgttagaaaagggaacaagccctgctatgtgttgttgagtaaagagaacagaggcaaggggcaagggagtgggcaggtgagggatgctgggagtgcaggcagggtgtggccagaggaggtgagaagccatgagattccggctatgtctggaaggcagagccagcagggcattctgacccccgctatgagagaggcaagccaaagctgacagcaaggctgtgacctctgtgggtggcaggcaccatcccctgggaggggaggactgtgggaggaggaacagattgatggagaatgagggggtgggaagaggggacccaaagttctgtttagggcaagtgggagacaattggtcaacatccaaatgggaagtcaagtgagcgtggatacacatgtgatgtttgggagggaagggatgcccagagatgcgaacatgagggttgtcggctcgggaacggaattccatgagacttggcaggacgactgaaggggcaagtgaggttggaggtgaaccaggatcccccggtgtcctgaaagccaagtgcagaaagtgtgcggagaacacaggtgtgaccgcctgattcaggggcttctgaggggaaggcgaggcccgcgcattgcacttgggatatggccatgtgttcatggagacctggacaaggaaagctttgatgggcgggagaagcgggttggtctgggttttagagagaagtggagagaggaactggaagtgtgattgttaaatctgtggaatcaggccaggcgcagtagctcacacctataatcccaacactctaggagccgaggcaggaagattgagcccaggagtttgagaccagcctgggcaacatagtgagaccccatctctacaggaaagaacaactttaaaaattagccaggttgtgatagcatgcacctgtggtcccagctactcgggcggctgagacgggaccgtgatcctttgagcccaggaggtcaaaactgcagtgaagaagtaaatttgaagatcacagacctccttaagacccactcatcttcccagaaactcacacctgggcacataatttggcgtctactctcagggagttcatggcccccatgaagcctcagggaatggaccatctatgtgtagaaggctagatgtaccctctcctgggaggcaggggagatgggcggtggactgaataatggcccctctacatcctagtccccccgaacctgatgtttccttatatggtaaaagggactttgctgaatgtaattatattagggatcttgtgatggggtgattatcctggtttatcctggaatgcgggagggcctgtgatgatggaagcagagactggagatctttgaaggtggaagaaggggctgccagccaaggcggctattagaagctgaaaaagacacggaaatataatagattctttcctcagggcctccaggaggaaccagctctgccatccctggacttaagcccagtggaactgatttcacacttctggcctccagaattttaagagaataaatgtggctgggcgtgggggctcatgcctgtaatcccagcactttgggaggtcgaggcagatggatcacttgaggtcaggaatccgagactagactggccaacatggtgaaaccccatctctactaaaaaaaaaaaaaaatacaaaaattagctgggcgtggtggggcgtgcctgtagtcccagctactcaggaggctgaggagtattccttgaaccaggggcggaggttgcagtggctgagatcatgccacggccctccaacctgggcaacagagtgggactctgtcttaaggggaaaaaaaatgatgttttacagatttgttttatgcccaagttaaggtttaccaagcagctggcacgctttagggacccaacaaatgctagtcccttttcttgtccattgaatgaactcaacattcctttaaccttccacatgtgataacagcacctgctatgtgccagctgtagacggtactgagttacttcctgtgcccaagttcatctctaaacttggaccccccgacccttcaccagggacctcattcctctaactcttggcactcccttctcctatctcagggtccagattttggctatgtaactcgagggccccaaacagggggtatcagtggactggactcctttgggaacctggaagtgagccccccagtcacagtcaggggcaaggaatacccgctgggcaggattctcttcggggacagctgttatcccaggtaaggaggggagtaacaggaaggggtggccaggacccaggtatgccgtagaaaagcagaggccagagtggaagccttgccttcctgcttccgattctagacagcccaacagacttgagggagtgtgagaggaatccaagcgcagggtgaggaatgcgggctttggagcccatagacccaagttcaattccagccctgccacttaccctctttcagtcagtgaatatttactgagcatccaaaatgttctgggagctgggaatgcagccgtggacaagaaagacaagtccttaccactactctagtagggaaacagatgatagaaaagtagacaagataacttcaaatgacaaaaacaaaagagaggggcacgggaggaataggaactgttagggtgaccagggaggtcctctctggggaaggggcttttgaactgaggcctaatgacagaagggacagggccacctggagatctgggacagagagttcctggcaaatgaaagtgcatgtgcaaaggccctgaggcaggaatgagctcctgcgtgcaaggccaggatggctagaacctattgaacaagaagaggctgggcacagtggctcacacctgtaatcccagcactttgggaggccaaggcaggtggattacctgaggtcaggagttcgagaccagcctgactaacatggcgaaaccccgtctctactaatgcaaaaattagctgggcctggtgatgcatgcctgtaatcccagctactcgggaggccgaggcaagagaatcgcttgatcccgggaggcggaggttgtagtgagccgagattgtgccagcctgggcaacagagcaagactctgtctcaaaaaaaaaaaaaaaagtgaggaagaacaaggcactgcaacactaatttttttttttaggagaaaactgaggctcaaacaggtgaaggaatgtccccaaggccacatggctaacaagagatcaccgacttaggtcagactggctctaagccccatgtgtacccagaataccagcatctcatctaactcaagaggcagtgctttctgaggctaagctctgttctacttaccttagtgactctgtgcctcagtttcccccaataaaactagaatgacaattccttgatttctcaaatgttaggggataaaataaaggcattctagactcctgcatccctttctcagctgaaggagaaccctgacctttttgccaagccccttgtccttcagggacttccctgtagcccttgctgccgataacacccctttaaccctgccatgacagcaatgacagccggcagatgcaccaggccctgcaggacttcctcagtgcccagcaggtgcaggcccctgtgaagctctattctgactggctgtccgtgggccacgtggacgagttcctgagctttgtgccagcacccgacaggaaggtacagtcttgggggctgcctcaggaagccatgcctccttcctgggtagaccctctgcctggggtgggagcaactttacttgtctatttctccttcacccttaggatggcagtagaggaggtggccagcttgggtccaagtccacactactcccaccctcagcagatccaccctcgttgggagctccaggggcaaagctgacttctaaccccagtgtttctgcctccagggcttccggctgctcctggccagccccaggtcctgctacaaactgttccaggagcagcagaatgagggccacggggaggccctgctgttcgaagggatcaagagtaagtcggccctgccttgttctcctgtctgtgcaccttcctgcttcccatagtccgctgttgcctggagggaatcatccaggcaatagggtagcatctgagcacctactgtgcgccaggcactgtgccaagtgctagggagactgcatgaacagggcagaacagcttgctgccctgtgggctcacaggccagggggaagtgagtcaaaagaacagctccaacacaggggctttgaggggtgtctgagtggatggagctcagggaaggcttcttggaggaggcagaggccaagcagtagcatgcaagtaggggttggctgggcaaacggggcagggaaatgagaggaagagagataccacaggcagagggacgggggtggggcggctcagaggcaggagaaagcacgatgtgtgtgaggacctcggggaggttcggtatagctggagcacagatgaaatattactctctcagcagagctcacagacatgggccaggccccgggctgagatgcctctgtggctgagagctccacctcagatctgagtatgttgtgtggcatcaggagagggctgacctgtttcttcctctctcgatgggatctctttggagataagataatttagcgttaatgcaaggcaaaatgttccagtgaacaagtttcatggttcaactttataataattataagtaaacctgttaaatttttctggacattcttttcttttgaaacgaagttttcctctattgcccaggctggagtgcaatggcgcgatctcgactctctgcagcctctgcatcccgggttcaagtgattctcctgccccagccttccgagtagctgggattacaggtgtgcaccaccacacctggctaatgttttgtatttttagtagagatggggttttgccatgctggccaggctggtctcgaactcctgacctggtgatccacccacctcggcctcccaaagtgctggggttacaggcatgagccaccacgcctggcttaaaacaaggacatttcttattgacagcaactaaatggtacttgtagcatttttatcacacagtagattccatccattcactatacttttctgagctgtctgtcctgcatgcaagtagatatttttaatgttgtctgttttctgtgctgttcctgtaagtgtgctattaaaatacactaaactaggctgggcgcgatggttcatgcctgtaatcctagcactttgggaggacgaggcgggtggatcacgagttcaggagttcaaggccagctaggccaagatggtgaaaccccgtctctactaaaaatacaaaaattagccgggcgtggtggcgggtgcctgtaatcccagctacttgggaggctgaggcaggagaatcactcgaacccgggaggtggaggttgcagtgagccaagaatgtgccactgcactctagcctgggtgacagagcaagactcagtctcaaaaaaaaaaaaaaaaacaagaaaatattaaactaggccaagtgtggtggctcacacctgtaatcctagcactttgggaggctgaggcgggtggatcacctgaggtcaagagtttgagaccagcctggccaacgtgatgaaaccccgactttactaaaagtacaaaaattagctgggcgcagtggtgcgcacctgtaatcccagctactggggaggctgaggcaggagaatcgcttgaactcgggaggtggaggttgcagtgagtcaagatcgcactactgcactccagcctgggcgacagagcaaggctctgtctcaaaacaaaaaaaaaattacactataaaaatatattttaggccgggcgcggtggctcacgcctgtaatcccagcactttgggaggccgaggcgggcggatcacgaggtcaggagatcgagaccatcctgggtaacacggtgaaaccccgtctctactaaaaatacaaaaaattagccgggcgaggtggcgggcgcctgtagtcccagctactccggaggctgaggcaggagaatggcgtgaactccagggggcggagcctgcagtgagccgagattgcgccactgcactccagcctggacgacagcgagactccgtctcaaaaaaaaaaaaaaataataataaaaataaaaatatattttaaaaagaatttaaatgaggtgagaacaacatttttaatgagaacttatactgctaaaatattgtattaaagatatttgacttgcagatgctcacagcaaacctgtatggtaagaattattactgactccattttatagatgggaacactgagtccccccccggcactggctgggaagagggaaatcgacctctaagttcatttgccttttttttctttttctccatgacagaaaaaaaacagcagaaaataaagaacattctgtcaaacaagacattgagagaacataattcatttgtggaggtaggagcctgggtgcctacaccccagcagacctgacgccctgtccccggctcagccactttcccagtgattagaggcacacagaggctcagggtctcaggatgcgctggaagacagagacacagaagcaagggcagaagcaaagactgggagaggctgagggagcagagggaatgggaggccccagggtcccccgagagcactggccagaggcccctctgtgcagtgaggcctggcagccaccttcactgccttcctgacactgtcccaggtcctaccctccggcagggggcctcagccccacactgtcccccacccccacccccgactgccatcagtcccccactcactgcccctgccccttccccaagagatgcatcgactggaaccgcgagctgctgaagcgggagctgggcctggccgagagtgacatcattgacatcccgcagctcttcaagctcaaagagttctctaaggcggaagcttttttccccaacatggtgaggaggtggcggctttaaaaccccagggtgtggcatggaggtagctcagcccgagaggccagtggggcacccgggcggtcccagagggcttggctcctctctgtaaccgtttgtagctttgtcctgagtggtacaaggtcagacgtgaccaggtccatgcacgttggtgtctttccacaaggtcaggcttctactgatgctatttccatcataaaatccacaagccacacggagttccccaggggcagtcctcaggtgggcagagccctgggcacacaggctcaagccactccacaagtcagtcagtcctgcaaaccatacatagtagtgtacttaatcaacacagaaatgttacagatgaaacattcttaccaaacaaagcaatatttaacatcaagagagaaggggataggaaaaggggtcagtgaaccagtccaaggagagtgatgtggacaaggagagggtcctgggctgatctaaatggacatcaacgtcttgcaaggaagagtgtaattttggcagagccttcaacagcgggtgccaggtgctaatcactagtgacagcaagacagtgtctgttaagacagtcatcttgaggccgggtgcggtggctcacgcctgtaatcctagcaccttagtaggccagagcgggtggatcacttgaggtcaggagttcgacaccagcctggctaacatggtgacacccccatctctactaaaaatacgaaaattagacaggtgtcctggcaggagcctgtaatcccaactacttgagaggcggaagcaggagaatcacttgaacctgggagacggaggttgcagtgagccaagatcatgctattgcactccagcctgggtaacagagtgagactttgtctcgggaaaaaaaaaaaaaaagacagtcatcttgagctagtgaagacctgctctttttatagccagagtcctctggtgaggactgatagtaatagagtatgcctgcttatgtccctatctggttgggtgcagtctctgttgattaggcaaacatctggttcctgttagcatggtgccttttgaaatgtaagatggagtctttttctaagatggagtcacttatgccaagggtgctctatacaggcttgcatggccctgtaccacttccagagcaccttctggtatctcacaacaattccagaagtcagagtctatcgtcgcttctgccagggctctggcttcaaaccccatgccgtaactaccatgctgccttcccacgtagcaccttccctggggctccggggtgatgcaggggatggagggatggatagggaatcaaccaacaaacacgacaccctcaagtcaccttatgcaccataacagggacacacgtgggggcaccacctcagactggagggtccgggaaggcctctgtgaggaggtggggctggcactgcctaggctgagtgggattcaccttctggaggctgcacttgtgggtggtcccacctttgtcttgagcgttcaccgtggcccctaagtgctgtcttgatatcatccattgtgtttttgccattccttggccccattcctccctctcttcagagcatacccgagaccgaggcagagacttcacccggtcctactggggaaccccagccacccccttcttctggagctgggggttacagttcagggaggagccagcaggccctaccaccgtggttttcaaactgggttcccactcagcctaggcagtgccagccccacctggggctccggggtggtgcctcaaatccagtggttcagattttctgtttctgcattgacattctgcaaaagattgtgtgtagaataaagggttccttggccaaaaggaattaaagtattgaccccaagcgttttgtttccctccagtttggccaagccaggcttcccagtgcgggaatgaaagtggacgcccgcggctatggtagtcagcaacgctgagggctgactgtgtgccttcactgttcaaggtccccagagggagtctgagcatgagaccagactctctcccaggagctggctgtgggaggcggggaagagggagtgatgaacagtacgaggcacttagcacgcatgggctgtgtctaggcggtggcccccttgaggactcatgacccatggaaaatggctgtgcatctactgtgtgccagcacagtgctgtgcctacatgttcttacctaattgtcattgcaacggagatatgtgttgggctcattttgctgatgaggctcagaggggtgatatgacttgcctaaggccacacagctattgaatagcagagttaggattcaaacccacataggcctacagccaaaatcccaccttcccacctcaccaggccacctgccaatctaatggaggaagcagagtcatttacatacattatttacatatggaaagtgccataacagaggcagtcatttatctgtctagtcaacagatgtttattgagtgcctacgacgtgcaaggcgcagtgctgggagttatgggaacacagagcaggagtgactgccagagctcagggattcatgggcagtttcacagaggggctgccatctgagctgggccctgagtaatagaaagagtttaccagaaggtgacaggtaggggaggagaacgtagtgttaagagcatgggcagcatcagaaagaacgaaatcagccaggaggggtggctcatacctgtaatcccagcactttgggaggcttaggtgggaggattgcttgagtccaggagttcaagaccagcctgagcaacatggagaaactctgtctctacaaaaaacacaaaaattagccaggcgtggtggcatctgctgaggcaggatgattgcttgagcccaggaggtggacactgcagtgagctgagatggcaccactgaactctagcctgggtgaagagtaagaccctgtctcaaaaaaaaaaaaaaaaaaaaaaattaaataatgtcctttgcagcaacctgatggagctggaggcattatcctaagtgaactaaaacagaaaatcaaatactgcatgttctcacgtataggtagaagctaaacagtggatacacatagacacagagatggaaataataggcactgaggacccccaaaatggagagaatgagagcgaggtgagggctggaaaattacctatcgggtacgatgttcattgtttgggtaatggatacactagaagcccagtgcccaccagtaatcaatatacccatgtaataaatatgcatatgtacccccaaatctaaatttttaaatttaaaataaataagagtatggaacttggagtctaatagctgtagtccaagtatagctgggtggccttaggcaaacaattttccacgtctgggtctcagttttctcatttgtaaagtggggctattatttttattttgttttaatttttgagacagagtctcgctctgtcacccaggctggagtgtattggaatgatctcggctcactgaaacctccacttcctgggttcaagcaattctcctgcctcagcctcccaagtagctgggattacaggcacacctggctcattcttgtatttttagtagagacggggtttccccatgttggccaagctggtctcgagctcctgacctcaggtgatccactcgcctaggcctcccaaagtgctgggattacaggcatgagccaccacacccagcaatttttatttttgaggtagagtctcgctctgtcgcccaagctgccaggctggagtgcagtggcacaatcacagctcactgcagccttgacctcctgggctcaagtgatcctcctccctcagcctccaaagtagctgggaccacaggcacgcaccaccatgccaagctaatttttaaaaatactttttttagagatggggtctcaccatgttgcccaggctggtctcaaactcttgggctcaagcgatcctcctgcctcagcctcccaaagtgctgggactacaggtctgagccaccacccctggaggggctattatttccaaaggtcagagaagggtggggccgctcagattgcgctgcaggctgcccgctgctgcctgtgacctgaaccctcacttccctgcaggtgaacatgctggtgctagggaagcacctgggcatccccaagcccttcgggcccgtcatcaacggccgctgctgcctggaggagaaggtgtgttccctgctggagccactgggcctccagtgcaccttcatcaacgacttcttcacctaccacatcaggcatggggaggtgcactgcggcaccaacgtgcgcagaaagcccttctccttcaagtggtggaacatggtgccctgagcccatcttccctggcgtcctctccctcctggccagatgtcgctgggtcctctgcagtgtggcaagcaagagctcttgtgaatattgtggctccctgggggcggccagccctcccagcagtggcttgctttcttctcctgtgatgtcccagtttcccactctgaagatcccaacatggtcctagcactgcacactcagttctgctctaagaagctgcaataaagtttttttaagtcactttgtacatgaggtcaagatgttgttggtatcattcattcattcactcatttgtcatggttgaattgactatcacaaaacaaactgaaaagtgttaacaggctgcactgaaggccacgttattgtgtgtgtcttttgctcccagacatgtatttgggctataaaattttgcatgatcctagttcgttctgagtttcccacgggacctttccaagaagaggaggaggagggagcaggggaggggtaagccccgctgagaatctgggcatatccctctttaaactcacctacaactgggcattcacctacgtactgatagcgatggatttttgtggaatgaagtaattcatctcctcggtgttcttttttatattgccttttatggcttcgacataaagactcagattcctctgtagaaaataaaacttgatggcttgagatcattaaaattgagaccagatattggctcaaaagggtccaagatattcagagaacacccagggatcctgttattttcatgtaggtcatggagaatatatgatggcggaaaagatgaatatcaaaagcctctgccttcacacttcctgatttcaaaacatactacaagctacagtcatcaaaacagtgtggcatgctcataaagacaaatagacctatggaatagaatagaaagcctggaagtaaaccctcgagtataacatttctccaaagatgatatacaaatggccaacaagcacatgaagagatgcttaccatcactaaccatcagagaaatgcaaatcaaagccacagtgacctcacacccattagaatggttactataaaaaaaaagtgttggtgaggatgttgagaaattggaacccttgtgcactattggtgggattgtaaaatgaaatgatacaactgctatggaaaaaagtatagaggttcctaaaaataattagaaatacaactgatatatgatcctgcaatcccacttctgggtaaatatctgaaagcaagatctcctttttttttttttaagagggggtgttttaccatgttgcccaggctgatctcaaactcttaggctcaagcaatctgtccaccctggctatggaatattattcagccttaaaaaggaaggaaggaaggccaggcacggtggctcacacctgtaaccccagcatttggggaggccaaagtgggcaaatcgcttgagcccaccaatttgagaccagcctggacaacacagcaaagccttatctctacaaaaataaataaataaataaataaaataaaaaaaaaaagagttgggcatggtggtgcacacctatagtcctacctacttgggagacagacgtgggaggatcacctgagcctagggaggtcaaagctgcagtgagccatgattgtgccactgcactccagcctgggtgacagagtgagtgacccagtctcaaaaataaggaaggaaatcttgtcacatgttacaacatgaatatgctttgagcacgttacgctatgggaaataagccagttacaaaaagagaaatcctgtatgattccacttacatgagttacctagaaaaattcacaggaacagaaagtagaggctgggccaggtgactcacacctgtaatcccagcactttgggaatctgaggcaagtggatcacttgaggtcaggagtttgagaccagctttgtcaagatagtgaaaccccatctctactaaaaatatgaaaaattagccaggtgtggggtgcacatgcctgtaatctcagctactcaggaggctgaggcacatgaatcacttgagcctgggaggtggaggttgcagtgagccaagatcgccccactacactccagcctgggcaacagagcaagactctgtctcaaaaaaaaaaaaaaagtagaatggtggttgccaggtactggaggagcaagaagaagggagttgttgaatgggtgtagagtttcagatttgcaagatgtaaaagctggagatctgtttcacaacaatgtaaatatacttaacactgttgaactgtacacttaaaaatggttaagatgggccaggtacagtggctcacgcctgtaatcccagcactttgggaggccaaggcaggcagatcaccagaggttaggagtttgagaccagcctggccaacatggtgaaaccccgtctctactaaaagtacaaaaattagctgggcgtggtggcgtttgcctgtagtcccagctactcgggaggctgaggcacgagaatcgcttgaacccaggaggcggaggttgcagtgagccaatattgtaccactgcactccagcctgggcatagagtgagactctgtctctaaataaataaataaaaactgtatttttttttgaaaagcctctgccctgccccactaaggagaagtggatccataaaacctgggtcaaaatacactgctctgaagacaatcggctgctcccccagccccaaatgtactgaagcaaaggatgtgagtgtttctgtggaccagaaggggaccagggacagaggaagctggtatgagttgagccccaaacctggcagatagggctgcctcgagcagcgaacaggacttagcagataaaactgaagattttgctggattcctagggctggggaaggactcagagacaagctggtggataaggcacccctggcatcaggggacatgcagatgcgcagatgttaccccagccacgtatgggttgcaggtgggaggtgtctctggagaagtcagggaagcccacgggagagaaagtgctaccatccctctagagcacagagccatcccctgatcatgcccatcaaacaaaaacttccctgttcctttcgccttgctcccacctctcccttccccagagaccacataggagtttcctgaagctgctgttacaaatcatcacgaactaaaaggcttaaaacaatagagatggaccctctctcagttccagagaccaggagatcaaaatcagtctcactgggctgaaattcaggtatcagcagggccatcccagctccaaaggctttaggaggggagtttctcttctagcttctgccagctttcctcagctagtggctgcctcatgccaatctctgcctccctggtcacatggctttctcttctgtgtgtgtcaaatctccctctgcctcccccttataaggacacttgtgatgatatttggagcccatcggatagtccaggacaatctccccatcccaagatcttcattcacctctgcaaacagactctttctttgtttctatatgagacaacctacaggttccgaagattaggacctgatctctcttgggtgccattattccacctactgtaggttggaaatcaccacgtgccagctgcagccagcagaataggaaagaaataagccaggcacctcctttcctttccgcagctctaagccttgcacctgcatcaagccctcataggaaagggtgaacattcccctttacaaatctgagtcctgaattgagagtgttttatgtctggttcctggaaacagattcttagatggagatttgcctgcaggaggtttatggggggtgccgggggagggtgtttccggaagcgcacctgggagggagtgtggggctcagagggggacactgaactgggatgcagttgcctcaaggcttcaggcaatgcacggggtatcttgggggctggggaagggcctcagagttgtcctgcattcagacaaggcaacctggcctttgtccccccacattggatgtggctgtccccagatggggacacaaccaggtactaggccgctcctaggcacagaaggcaattccagaagagagacttgcggcactcgcagcagctgggggcgtgagtgcctccccctaaaggggggcgcggtggcacaccacagcgcccaccacagtgacctcaagtgaccatgggacttctgatgagcaaacctgagttgagcatgatgagcaaacctgagttgccgagagagaacttctgcatggaataagcatgtgaggagtgcgggagtcaatacaaagttactttatgatcatgtaacccaagcaggtccagccaatgccagttggagagctcgagcccaaaaacaagagcaaaatgtggtagaaggtgactttatttaccaaaactagcaatgggggagtggttggattcacatcaaaagcaaccgcttcgcctttctgggttgaaggcaagagttttaaaagggaaactctggctgggcgcggtggctcacacctgtaatcccagcactttgagaggccgaggtgggcggatcacctgaggtcaggagtttgagaccagcctgaccaacatggtgaaaccccatctctactaaaaatacaaaaattagctgggcgtggtggtggacgcctgtaatcccagctacttgggaggttgaggcaggagaatcgcttgaacctggaagacagaggttgcggtgagccgagatggtgccattgcactccatcctaggcaacagagcgagactctgtctcaaaaaaaaaaaaaaaaaaaaaaaaaggaaatttggtacaggaggtgtgcaggagttgtgaggagtacaaggtctgtgtcttgtttccatggctaactcgggtctcagtccccctaaagcacgggctgacgtcatttcagcaatgtgctgagttgttggctagctgcctggaggtaatctcttgaattctgcagctgggtctccaggctcggtctgtctcaagattagcccctggaacttcttttatcatcatcatcatcatcatttagagacagggtttcgttatgttgcccaggctggtctcaaactcctgggctcaaggaatccttccgtctcagcctcccaaagctctgggattacaggcgtgagccatcacacctggcctggaacttgtaagcaagcatataattagatactagcatacagttagataaatgtgaaggggctttatggtgggaaagggagggacatggagtctattttagggttaagggaaaaggcttctgcagtttgctttaaggttacttcttgagactgaagagaaagggaaaaaaagttgtaaaatgcatttgaagttaagctgctcagttacaatcactaacccctcggttcagtggagacacccctggaagcccattgggttattatctttattttattcatttatttttttttgagatagaatcttgctctgtcggccaggctggagtacagtggcattatctcggctcgctgcaaactccatctccccagctcaagcgattctcctgcctcagcctcctgagtagctgggattacaggcgtgagccaccacacctggctaatttttgtatttttagtagacgggtttcaccatgttgaccaggctgatctcaaactccggacctcaggtgatccacctgccttggcctcccaaagtgctgggattacaggcctgagccaccgtgcccggctgggttattatcttcttagggggaggacaaggaggtgatttagtcatttgctccacaataacttgttgagtacctactatgtctggagctgttttgcaggtgctggggattcagtggtgaataagaagcccctggaggcgagcaggacgtgctctgggtctgagtcactttcatctctgtccacgaggctgggtgaggagccttcctcactgtgctctgtagagccctggcacaaggcagggctgccccagggtggggaacgtcagagcttccaggctgccttcctccagaccccagagcctggactgggcctcagcgacccctccccagtcaacccgtcttctccctccagctgcctctggccgcttgtgcgtgagggtgggtgagccctttgggatgagtctcatcagagcctctgcacgctgagtgcttcctgcctgcttaattttgccactttcaatccaaccagaggggcattttgggtcttgctgaccaaccccctgcctccaagagcaactaaaacagagacatccttgagagttgtgttgagtgcttaaaacctccagggagggaattttttactgcaacttgcaaatttagccagcctggctgaccgaacaggcttcactcagtacctcatctccacctcctatgctgggtacacctgggtgcatattagagcaaaggctgaaaacaaatgtttatattacagtacaaccctatgtaaaatacacagctgtacaaaggggtaaggctgctttttacgtactgatacaaagaacttctctccagtataactatgaagtgaaagaggcaaggtatggaatactgggtggcacatactaccgtttatataagaagacagtagtaggaggagagaagaaaagagcaaaagcgccccggacatagtaggtgttcagcaattctagtggagcaaatgactaaatgacctccttgtccttcctcaaaaaagataacccaatgggcttccaggggcatctccactgaactgaaaagtttgtaattgtaaccaagcagcttaactttgagcacattttacaacttttctctttagtctcgagatgtaacctcgaaggaacctgcagaagcctttttcccttaaccttaaaatagactccacgtccttccctttctcaccataaagccccttcaaatttatctaactgtatgctagtattggaggaggaagagaagaagaaaaggatacacacacatatttacttggtcatgcataacatttatttggaaagacatataagaaacgggtaacactgtcactacctccacctgcaggtgggtaaggcacagggcaggagggagactctgaacttggaatcatgtgactgtggtacctattcaggagtaagcatgacccagcctgggcaacataacaagaccccatctctgcggaaaaatgtaaaaccattagctgggcatggtggtgcacatctgtagtcccagctgctcaggaggctgaggtgggaagaccacttgagcctgggaggtcaaggctgtgaaccatgatcacgccacttcactccagcctgggtaacggagtgagaccctgtctcaaaaacaacaacaaaaaaaaactcaacccaagcttaagacatgaaatgaacacaattttaaagtcagttatgtaagttccttgtgccagagaagggttcctatttctttgctctgtgggctccgctgagatgagtagcagctgatgaccctggcttgatgtattcattccactaacacttgctgtgcccccacccccaccgacacagctgtaagcaaagagctcaccttaatcactgggggttgggatgcaggttcctggaccacaccctagaccttctgggcccaggaatttgcaatgttaacaagcacccttgataatttttgaaaccaccagagggttaataaccacctagtctaggcaggcgctgtggctcacgcctgtaatcccagcactttggcaggtcgagataggaggatttctgggatcaagaagttcgagactagcctgggcaacatggcaaaacccggtctctacaaaaaatacaaaaatcagctggacatggtggtgcacacctgtagtcccagctacttgggaggctgagatggatcactggagccaggtaggttgaggctgcagtgagctatgattgcgccactgcactctagcatgggtagagaccctgtctcaaaaacaaaaccaaaccaccagtccagcactttgccgagctccttcgtcaatttccaggagacacacaccctagaactgagaccccagagcctgggcatgctgccacacattgccatcctgactgctaccatcaactcctcccaactgccctctgcaggtatttgccccgacagcttccagctgagtcctccagcaacatggccaagttgatcactccaaggcaccgacttcccagagcccctcctcttcccagctgaaggccacagatgcctaagcaaccggcctcagactcccctggcctgcagctctgcaggcacgaggtgcctgataaattggtgatgaaggggttctgatgccacctgctccccagactatcagccaccaggaagctcttagagggaaaatcagtgacacctgggcagctgctgacccctccccttcttaacaagggggtggcctgcacaggcctggactgtataacagggaagggcagggtgagccctggggcgtctgaggctgctgtgctgagtgagggctgcggtgcaggcctgaggatggtcagcgtggagggccgagccatgtccttccagagtatcatccacctgtccctggacagccctgtccatgccgtttgtgtgttgggcacagaaatctgcttggatctcagcgggtgagatgctgggagctctgccagaggtggcaggcagacaggcaggcaggcctgggacccagtccccttgatctgggagttgggggttacttctctagcctcactatcctgccccatcttgggaagccttgggtctctagtggggggcctcccagttccaaccacgcagaattctgacttaaatcctgcctctgccctgtagcagctgccatggactcttagtgaggcaagggccttggcctctctgttcccctatctgtgaaaccatggggacgctggcctcggggggctgtgaggagcaggccagggagactgctagatgctggagcctgcaggtggaggtgactcagcagggtcacagtacaacttcctgagtcgcttgccctgatctttttctttatggggatcctttgtggctccccccttcttgggaattgggtgcttattactaagatgtagctgtggtaacttctgcagtgtcggtagcgggatggggtttgggctggagcccgtcggagagcaaacacaggggtcctttgggagggggtgggtaggaataaggaccccagaccactctgcctcaacaccctaaggagaatgaggattcgggagccgtcccctcccccatgccagtcatctcctaggctgagaaggtgtttgtgccctgacgcgtgtctcttaccgggcaaaccaggtgtgccccccagaagtgccagtgcttcaccatccatggctctgggagggtcttgatcgatgtggccaacacggtgatttctgagaaggaggacgccaccatctggtggcccctgtctgatcccacgtacgccacagtgaagatgacatcgcccagcccttccgtggatgcggataaggtaagcctcaggggaagaggtgaggggcatctcccggggtgggacctagcacagccactggggcttcctcctggctgcagacgtgactcgagcctgggaaacacgttgttttgcacgtctgatctcatccagtgtctgcaacagaccagtggtgtgggcactccatgaccccattttacaaagaaacagaggcacctagcgaaggtgccctgccaagtcagcaaccagcaggactgggatttattttttattttcatttatttattattatttttttttttgagtctcacgctcattgcccagactggggtgcaatggcacaatctcagctcactgcaacctccacttcccgggttcaagcaattctcctgcctcagcttcccgagtagctgggactacaggcacccaccaccatgcccggctaattttgtatttttagtatgagacagggtttcactatgttggccaggctggtctcaaactcctgacttcaagtgatctacctgcctccacctcccaaagtgctgggattacaggcatgagccaccacacctggcctaccatcactttacatatgaggaaactaaggcacagagtgctgtgtctaaacctaagtagcctacctagagtgggatagacccaggatttgagcttgagcccaagggtgtattctcccctgggtaagctgtctccctaatggggtgcctatgttggggaggttctcctgtggtagaagcaggtggctcattcagggcaggagtgttcaaccttggttgcaggtgagaaccactggggagctaataacatcaatacccaggccacaccccctctaccaattaaacctgaggtaccaatggaacctcagggctaggatcctggccgctggtttaaagctctccaggtgcacccagtgcggggctgggggtgagaaccatgatggagcagttcaggactgggagagctctccctccctccccccacaccctacaggacctactggagatgtctgctgcagaggggtaggtacacacacccacctgcgctgtgtgcccagggcaggcaactccctgagaggcaagtagtggacttaggtaggaactgagtgtctctggccaggtgtggtggctcatgcctgtaatcccagcactttggaaggctgagatgggcagatcacctgaggtcgggagtttgagaccagcctggccaacatggtgaaacgctgtctctactaaaaatacaaaaattagccaggtgtggtggcaggtgcctgtaatctcaggttctcaggaggctgaggctggagaatcgcttgaacccaggaggtggaggttgtagtaagctgagattgtcccactgcattacagcctgggcaacaagaacaaaactccatcgcaaaaaaaggtatctcagataagaatggaggccacggtgggtgccagtggaactccagactacctgagaaccattctctgcccagggctcggcctccaggaccctcaggagtggccaacaaagaaccttgaacttagaggactaaagcttctatttaaggatggggtggatctgtcacatgctctggccaatggttgggtctctggttcatgaccaagaccttgtggtcagggtcagtggctggagggcaggtctctttctaaaagcataaagtagaggctggtgtgggacacagtcccacagttgggactgagtcccaacgctgcttcttcacctgggtgtccttcttagtgagcagcttaagccaccagaggcctgtttccccaccgtgcaccttatggagtaggacatgggaccccaggagagtgggtttagcagggaggatgtatagtgtggtttcaagcttgggctctagagccaggcagcctgtttcttaaatccctttgggataagtcccttgatcaccccgccatcagggatacagctctcacgtggacaggtggtttcaagcctggctctcgacaaggttagggttgggggtcatggcaggttctaagtccttaggggactgactcagccctaagcgcagggctgtggccccataccagctcataggtgagacttcagaagccataacacaagaccaagatcccacgcctagactcggcacatggcctggggctctgttcctggcacctcccgtccaacactgcctatggtttcgggatgctgtctccacaggtctcggtcacatactatgggcccaacgaggatgcccccgtgggcacagctgtgctgtacctcactggcattggtgagtgttgctccaactgggagcctggggcccaactcaccgctggggttggggaaggggtgggattgtaggaggagccaaaaaagattctccaggtaacaagatgcctcctgtgggccccaggaactcctgaacaaactcctaaatggattcatttgagatacccactcacacactccctcctcgacgctcagtcacttctccatcttcgtgcactgccaacctaattctgagaatagaaacagccagaacttccgtgtcgctgccatctacccacctacgcctgtctagtgcctaccttcttcctttgttactaattgacgcatctggtccaaagttagtctttcttgtctcactagatcctttcttattcaagaacattcctttgtcaattcttaccaatgtaagaagccgccacccttccccgccctctagatcacccccatcagctcaggaacaagctctataacatctactttttttttcttttttttctgagatgagtcttactgtcactcaggctggagtacagtggcatgatctcggctcactgtaacctctgcctcccaggttcaagtgattctcctacctcagcctccagattagctgggactataggtgtgtgccaccatgcctggctaatttttatatttttagtagagacaggttttcaccatgttggccaggctggtctcgaactcctgacctcgcgatccacctgcctcggcctccccaagtgctgggattacaagcgtgagccactgtgcctggccatatcatctctcttaaacctgattctagggtgtttgtttttgtttgagatggagtcttgctctgttgcccaggctggagtgcagtggcgcgatcttggctcactgcccattccacctcccaggttcacaccattctcctgcctcagcctcccgagtagctgggactataggtacccgccaccatgcccggctaatttttttttatttttagtgggctaattttttttatttttagtgggctaattttttttatttttagtgggctattttttttgtatttttagtgggctaatttttttgtatttttagtggagacgggatttcactgtgttggccaggctggtctcaatctcctgacctcgtgatccgcccacctcagcctcccagagtgttgggattacaggcgtgagccactgtgctgggcctaggttgtcttttaaagtctattctcccacctctcttcctgaggagccatctgtgtcctcaatttctctagaatcttctcaaattagacacctaccaccaacggagttcttttagaactctaacatctacaacactaagtttttggtttgtgtgggttcttttgtgtttttgttttgttttgttttgtcttgttttttgtttttgagacagtctcactctgtagcctaagctgaactggagtgaagagacacgatcatggctcattgcagcctcaaacgatcctctcacctcagcctctccagtagcttggaccataggtgttataccaccatacttggttaattttttatacagacataggtatccctatgttgcccaggctcctcccacctcaatctccagagtggctgggactacaggcacgcaccaccatgcccagctgactttatttttttattttattttttcccccatagagagggttttaccatattgcccagcctggtctcaaactcctggcctcaagtgatcctcccgcctcagcctcccaaagtgctggagttacaggcatgagccacgtacctgctggtcaatcccctcttaacacacttgaacgcttcagggatgttcaacttatttttcctcctgcctgttccttctcagaaccctttggagctcagaggagctcttctcagtcctttgtcccgctgcttccagtcagtgaagtgtctcaggctcaggaggcaggtcacgtgactctaatgtcacctatgggcaggctgctcccacaaacccgacttggatattgcctacccagcatgatcgcttcggtgtctgacagatgtctgaaatgcaaatggattctctctactcctgaaaacctgtttttctagtagtccctccatcacagtaggcggtagctccatccttctagtgtaaaccttggcatcacctgattcttcttaccccacagcagtctgaatcttgtgttacctgacgtttcgccagaatccagcaactcgcactcccagtgtgttcactccggctcgagcccccatcctctcacctgggtcacagcccagacctcccagtggggttcatgctggcactcttgcccttctgactaagacctctagccttgatccagcagccagagtggtacatctttaagtggaatattggaataacgccttccaactgcttccacgttgcttggattaaagccaaagtcgctgcccacgaaactacacgagtaaccctgcactgcctctgtctttaccgcttgtgaatcttccccctgggtcatcctgctgcttctgctgtgggtcctgttggccactctaacccttggccttgctgccttgggcttcctatttcccctaatggctcttaccctagatgttaacccagattttcttgcctcctttaggtctcttttcaaatgtaaacttgggctcccttgatcatctaaaactgaaataccctcgctccattccttctcccatatccctcagtgcttattgctatcaaacatgatgtacctgcttgccccacccctggtgtacacatatgtgctcatgtaagctctaaggagatgaggtctccgtcttgcacgctgctagatccctaggacctggggcagcccagttcgcagtgggcatctggtccctgagcatctgctggtcaggtgctgatgatgtaacagcaaacaagtcctgcgttcgtggccctgatattccagttgggaatcagcatgtcaaataatgagctgtgaacaaaagaccacactggagcgacgtggttgtcccttgtgtggtggaagggatgggaggtggtatgctaaggaggcgggacagtccctatgacagtacctgggcaaaagcctagatccttaagtgtgtttttttgtttgtttttgttttttgagatggagcattactctgtcacccaggctggagtggagtggtgcgatctctgctcactgcaatctccacctcctgggttcaagtgattctcctgccttagcctcctgagtagctggaactacaagcacctgccaccacaccgggctaatttttgtatttttcatagagacaaggttttgccatgttgctcagtctggtcttgaactcctgacctcaggtgatctgcctgcctcagcctcccaaagtgctggggttacaggcatgagccaccatgcccagctaatccttaagttttaaaggggcttagaattgtcatgtattgaattttttttggggggggggacagaatcttgctctgtcacccaggctagagtgcagtggtctgatctcagctcactgcaacctccaccttcccagctcaagtgacactcctgccttggcttcccaagaggctgggactacaggtaccctccaccatgcccagttaatttttttttttttttttttttaagacggagtctcgctgtcgcccaggctggagtgcagtggcgcaatctcggctcactgcaggctccgccccctggggttcacgccattctcctgcctcagcctcccgagaagctgggactacaggcgcccgccacctcgcccggctaatttttttgtatttttagtagagacggggtttcaccgtgttagccaggatggtctcgatctcctgacctcgtgatccgcccgcctcggcctcccaaagtgctgggattacaggcgtgagccatcgcgcccggccgcccagttaatttttgtatctttagtagagatgcgatttcaccatgttgcccaggctagtctccaactcctgaccttaagtgatccatccacctcagtctcccagtgttgggattataggagtgagccactgtgcccggccatattaagcctttcctatgtcttggagcataaagctttccagaagactagagaggtagactttgcaagtaagaatcacttgggtagaggctgaaaggcatgagatggcatgagaggaccatgatgggcttgttttgtgagttcctgggaggtttggggtagacatttgactacttgggcctctccaggcttgctgatatgaagctgtcacctttgagaatggtttctgcttctaagctgatagcatgccagaaaggctagatgccctgatgccagccttgggcagccccacaggagataacctataactttgaggttccatctggcaggtcaaggtggctgggacacccttttcttctgtttcagaggtctctctagaggtagacatctaccgcaatgggcaagttgagatgtcaagtgacaaacaggctaaggtgagtctgccagcaaaagggggcagggaaggggccctataagccaaatctgcccacaggctcacttgatctgaccttcctcgtgtctagcccaattgctgtgacattgctgaaggattagatacgtggaggggaggggtaaaccaaactgtcacggtacaagtcagagctgattaaattccttttcttttgtggggtatttttttgtttttttttgtttgtttgtttttgatgttgtttttgatggagtttccctctgttacccaggctggagtgcagtggcatgatcttagctcactgtaatctccacctcccaggttcaagtaattctcctgcctcagcctcctgagcagctggggttacaagcgtgtgccaccacacctggctaatttttttttgagacggagtctcgctctgttgcccaggctggagtgcagtggcacgatctcagctcactgcaagctccatctcccaggttcacgccattctcctgcctcagcctgccgagtagctgggactctaggtgcctgccaccatgcctggctagttttttttgtatttttagtagagacgaggtttcactgtgttagccaggatggtctcgaaatcctgatctccagtggtccacctgcctcggcctcccgaagtactgggatcagaactgattaaatttctagctcactaaaaaaaaaaccagaatgtctggcaactctaggctcatgtcctaccctggttgtggagtctcctagatgagaggattagccgctgctgccaggtggcacgtctcttttccaatttgcctcggtccctgattctctgactctgaaatatgaggtaagtaactggtaaccccgaacctagcttctttcccttcctcttagcctccttacctgacatgaccttcctgtgcctacagattcttgacctcaccagtcctgttccatgggtccctgtaccctggagaaaggcttggctgggcccctctgctatgaggtgcatccgagaaacagaagatttatttggctccttcctgagccaatgttcccatctcatttgcagaaaaaatggatctggggtcccagcggttggggtgccatcctgcttgtgaattgcaaccctgctgatgtgggccagcaacttgaggacaagaaaaccaagaaagtgatcttttcagagggtaggacctcagactgtctctgcctttccttcttggtctctttgctgccctgcttctcagcaaatggattccagactaattttctccaccccacccccgacaccctcttccccagtccccatgcctgggctgatcaaaccttttgtcctgagttgtagatgtataattgggtaagagaagtcacatagccccatgcaaagagcatgggtggttacttgtttcctagctgtgaacttgagcacactaacttccctgatcttgtttccctatttgtaaaatggggatgatgcagttggcctcccaactatatcagttggttgacaagactaaatgaagacaataggggtatatgcgctgctttctaaaaagcctctcatagtctgggccaggaaccttggactgtcttgggtaaaattcgccttggatcctgacttgcggttgggaccagggttctgggtcttagcagtagaatggaatgtcttgtttcctactgagactggaaacaagactggaaacaaggtgaaccttcactgaactgatcgaggtaggccctgttctgtttgtgggggaccatgggataaatcccatcctccctcaaaaggaggccctgaggtttgcagcttgcctgtagccacctagaacaagcagtgaaatggtaattcttcgggcctgggccctagcaaaaggcagggggtccttggtgctctgttcaaactcccggcccctctctactgctcttccctccacccccagagtgctggcctccagacattccttaacctttgctttgtcttttgcccagaaataacgaatctgtcccagatgactctgaatgtccaaggccccagctgtatcttaaagaaatatcggctagtcctccatacctccaaggaagagtcgaagaaggcgagagtctactggccccaaagtgagtgttcttgtgccagctccagctttgcctgctctcgacgtgccaggcaagttgtgcccacacctcctcccagcaaggtccccagcagaagcctgctggagacctagagctgcagatgagaggctgttgtggctgtacttgtgtttccaggattctctggctgccaccttccccataggctaaatctgtacacatgggtgagttattgcacctctaagccactttctccacttgtaaaatgggggtagctgtgccttccctgcaggctagaagagaagagagacatatccactgaaacagtagctattgccttacacagagtagatcacatctcccagtgactcctctcaggagaatccatcttcactctaaaccaatgatccactatgttaaatttccagaaatctgaggccaaaacctctagagcggcagccacggtagcacctgcatcccagccaccacgccatccaccacccatcttcagccctcctctcctgggaggcaggtagcatactctattctatagatggagggctggttaggaggtacacatgcccaactccagcaaaacagccttgcacatcttttgacttccctgaactggctcaggacttggcgtacctctaaatctctcattgagagctagctctgcttctggacggacatgccagcatgctttctttgggttttgttttgtttttcccctttgagtcaaggtctagctctgtcacccaggctggagtgcagtagtgtgatcacagctcactgtagactagactcagcttcctggactcaagcagtcctcctacctcacactcccaaggagctggtatgacaggtgtgtgccacaactggctaatttgcttttcttgtagagacggggtctcactttgcccagactggtttcaaactcccggatgcaaacaatcctcctgccttggcttcccaaagtgctgggattacaggtgtgagctactgcacccggcccaacctgccaccttgtcttgtaaaccatgcttagcttcagctacgcaacgcagggagctctgtggtctatactgtgcctcttctcagagggcaccatctttgttgccagcattggagagtgtgcccctgccacttcctggtctacactctggggccttggctcagtctcctactccatctcttctgcagaccatagatctcagctggatttcaaagtagcctgggattagccagaaaaggtagcccagcttggacgtggccatcttacacatgagctagagtgagccgaagaaacccaggggtctaggtctggttcaggccacaagggctactctggccctgggaggctaccagtgctgaagtaggtggattaggccaggcaggccttggagtccgccggttcatgtagcttgctaaggatgccatacttcatcatgtggatcatagcgaactaccggtttctttattgaaaaagcttattcaggctgggcgtggtggctcatgcctctaatcccaacattttgggaggctgaggcagatggatcacctgaggtcaggagttcgagaacagcctggccaacatggcgaaaccctgtctctactaaaaatacaaaaattggcatggtggcgggcatgcccgccagctactcaggaggctgaggcaggagaattgcttgaacccgaaaggcagaggttgcagtgagccgagatcatgccactgtactccagcctgagtgagactcaaaaaaataatttttttaaaaaaacttattcaacaatctaggggctgagcacggggcttatgcctataatcccaacacttcgggaggccaaggcaggcggatcacctgaggtcaggagttcgagaccagcccggccaacatggcaaaaccacatctctactaaaaaatacaaaag

SEQ ID NO: 5620 - DNA, 284516 bp, Homo sapiens
  EIF4G3 gene - 20878278 - 21122793 of chr1; NCBI Entrez Gene ID: 8672; Build 35; sequence includes 20,000 bases upstream of initiation codon and 20,000 bases downstream of termination codon of the gene
aacctattgtatgcagggtatgagggggtggtagcggttgtacctactctcaagaaatggaatgaaatataataaaatgaacttactagacaacaatatcaattagtccactttcaagttctttggaagtttctttttacacttacaaaaagattcagtctattattactagttaagaattattattgtgctgtcaagaatgtttatggaatgtcagtttacctttgatattctaaaactgccctctcttcagtttttgggtggttccaatttatattaattgacatatctgaaacttagcaaaaagaaggtagtttgttttttattttatgtttgcacatacatgtttggctcttaaaatgttagtaggttatatagttcttttcattaaggagttttaaaaaattaatagttaagaagaatgtagttatatctacaccatgaagtactacttaaacatttagaacaagaatgaagtaggtatgtttattgacttggaaagatctctaatgttttgataagtggagaggaaaacatgtcattgaatatttattattgtgttgttgctattatttttacacatttgtaagtgtatagaaaggtttgtaataatgtgcttcagagtattaatcattttgccatagggagtggagtgggatttgaagggtaaagagggcactactttttcttttttttaacaaaaatcatgtttatacattattgtagcaattagagaaagtaagcatcaaactttttttttccacagtcttagttgccactgcctgatatgcaaattggtaataattctatcctgattcaatcactagatgcaaatggttttccacagtggccttaaaattttcctagattattgaaaaataatattgtattagcagtaataagttgtggcttgccgttttcctttgtggtcttaaatttatttttccaaaattttaatataggacagttagctgagttcaagtcttgcattactttgaaagatcatctttgactgaattctataatgatttataagataaccatgattgagtatatttcatttctctattcttcctgtgctcaccttttacgtaaaacaacaaaaaaaatctcattcttacccatgattagctcatcctcttttctttcgacaaacctcacagtcagtgtcatcaaatatttgtgaaatccagatgctgctgctgctttcctaccccctcctctcccccggtaaaaattcctacgagttagactcagtcttttttctgtttggcctttctttctaaatagagaacagcctttcctgttgtgacagcctaaaatgtgtttgaagttacttttctgtgttttcctaagtacaaaataactgaaagatcctctggcctcttggagcttgcttttccaggggactaaacattggagatgttgcagagcttttaagaatattgagataaacttaatttagaaaacatatattgaatgagagctatatgcaaggttttgtgcctggtaatgtgagaaagcagtggtggacactatgatccttgtctttaagagtgctcattttaccaggcaagatggtgatacgttgttttaagtacatgtgggaatgtgaggaagagacattaatgattatgtaaatgagaacaaaaatatgtaaataagtagtaacatttactggtatagtttttctgggttctcattaagcaaaagtacttggaggagtgaagcatggttaaacagagaaagatggtatctagatgaactctaagaagccataaaatgtaggtgggcagcaagtttggactgcatcttacaagatattggaatgagtgtacatacatcagttaaagcctttgaggtggaggataaggttacagctacatagtgtaatgagccatgaaatagataacaaaaattgaccaaacctaggcagaggagttaactggtgaaaaactcaacagaacagtttatacaggttgagcatctctaatcaaaacattcaaaatctgatatgttctaaaacctgaaactttttgtgtaccagcattattctcaaaggaaatgctcaatggagcagttcagattttggattttcagattgggggtgctgaactggtaactgtttgcaggtgttccaaaatctgaaatctgaaacatttctggttccaaatttttcagatagggatactcaatctgtagaacattttctttattactataagtaacacttactgtgtaacagttacttttctaagcattttatgtgtattaactcaatccttatgacaactgtatgaggtaggtataattacattccccattgttagttggcaaatagacacagaggtgacgtatcctgcccaaagttatccaggtagtgtgtggtagaggttggatttgaactttggtggatcttttaacatttattgagtgactacagtgtcccagacactgtgctaaatgctttacattcatgatattatttaatacttatgacaacctttatttacaacaaaggaaaatgggacttggagacatgtaatttgaatacaggtctgttttgaatctacaagttcatgtgaagtattctgtttttttttttttttttttttttttaaagacagagtttcactctgtcgcccagactggagtgcaggtgcagtggtacgatctcggctcactgcaacctccacctcctaggttcaagcgatactcatgcctcagcctcccgagtagctgggattacaggtgccttatgcccggctaattttttgtatttttagtagagacagggtttcaccatgttggccaggctggtcttgaactcctgacctcaggtgatacacccacctcggcctcccaaagtgctgggattataggcatgagccactgtgcccggacccttctttttgttaagatcacaaataaggtcaaaagcaatactcaatttttgggggattagggcccttttgaaaatctgatgaaaggtatgaatctactttgcagaacagtaaacatacaaacataggggttttctttttttattttattttttgtttatttatttattttttttgagatggagtctcgctctgtcactcaggctggagtgcagtggcgtgagccactgtgcctggcctctttttttattttttaactgcagttttaagagagttcaataactctcactgataagattccttattctagtctagacagattttccccttgcagtggtgctgtgttgcactttgaacctgattcctaggatttggaaatagctcaacttcgactttacggtgtattaaatggagaggtatcttattaagattttatttacccttctattttgaagtatttttcttaaaaagcatttatacatgtggtactcagttgtattctggttattaaaaattttatgtctttttctacccatcatggtatctgcttgctgattaataacatttatgaaagttaggattccttgttgttaatatttaatgtgaatttgctcattaaatgttaaatcagataccttgttaaaatattatttaataaaagccagacgtggtggctcatgcctgtaatcctagcactttaggaggctatggtgggcagatcacctgaggttgggagttcgagaccagcctggccaacacggtgaaaacccgtctctactaaaaatacaaaaattagccaggcatggtggtgggcacctgtaatcccagctgttcgggaggctgaggcaggagaatcccttaaaccccagaagcagaggttgcagttagccaagatcatgccattgcaatccaccctaggtgataagaatgaaactccgtctcaaaaaaaaaaaaaaaaaagaaaagaaaaaaattacttaatatgtatttacctgattacttttcttcaaaagaaggattaaccttaaagatacaagggtatgttattttgttaaatgccagttataaatgtcttttgaatttctgggataagaaaacagtagaaataataataaagttctttaatgtttgaaaactgaaaatgtgtttctttgaactgtgggatattcccttcacagcaattttacaaagtatatgtactgtttttaaaaataaaacaactgatatggaccacgtttaactaaaatgagtcataggaaattagattttaataactagttgtgtggtaaatggagttttaattattttaaggaaaaggaaagaaagaccattagtatctccaggcatggatttattattgccatgaagttgttgtcatgaatagaacgatcagtttttactgtaaactttgatagacactggagcatttaacttcaactttatacagttccctttttatcttttaaaagcacatctggctgtcgggaattctgtaggcaagaaattgtgaaggattagaaactgttctttgtgcatttaaactgtcattctgtggttgcttaattgccatatagaatgcagaatactagattagaaaggtgtttagtttctttagctgttacagatcccaaagaacttttgactctgttaatttcttatggctataacatttctatgttaattttttacatatctaatgtaaaatcaatggtatattgttattctttgttcaataagcatttgtttagtaactttattttttttaatgtttttatattttttactttttttttttttcctccaggagtggactgagtctgatgaggctgcagggcctggcccctcatccctccccctcccgccataactctttaaaaaattcagaaaaatcaattaggatgaggtgtcaagtatttagttatttgttattattaattttcttttgagacagagtctcgctctgttgcccagtggtatgatcatggctcactgcagccttgacctcctgggctcagttggccctctcccacttcagcctcttgagtagccacaacctctggctaatttttgtatttttattagagacagggttttgccatgtttcctaggctggtcaagtatttattttaaacttgcttaaaggattagactttgcaaaccacagctttaggtttattgtaacactctcacccccatttgtataaatgaaaatcaagcaggaatcatttcaccccaaaactgtcttacacttactggcttaatattaggattttaaaccaacagtttaaatatttgtaaataattaaacacactttttatatactaggcattatgataaatattatcttaatgtgttgaataaatcagcatgataagtccttacttttcacttttacagaagaggaaactaaacttaagtaatttgcttatatagtttctgtatagtagagccagaattcaaacttaggtctctgacaccaaaacccattctcatttttttctttttttcttccccccgccgccccaccactgttttttttttaagatagagtttcagtctgtctcccaggctggagtgcagtagcatgatcatagcttgctgcaacttctgggcttaatccttctctcccagcctccctagagctaggactacaagtgcacaccaccatgctaaatttttttttttttttttttggtagaaacaaccccatgctcttttattgatgctgtttagcctacttggatgccttgaatctgtttaccttctgtttatgttccttctttcaagtttgtgtttggaaagtgataattcgtgactcagcctcagaatggaggcatatatcacacatcttacatgatttggatctgtgtcagaggaacttaatattgtggttttgataatataattgaatttatgcttatagttgaatactaaaatctgagatttattaataccttggaattaaaatagaattcacttaccttggatcagttaaataactagttgattagcaactgactgaagatcaacaggaaaatagtaaggcattagttttaaaaaattaagttgtaagttggtaaatgactaattccattgcagtcactgaatgtatatcagtaatctccagactcgcatacaaccttgtcttggtggaaagctctgactatggattttgaacataagaaagagaatgtgagtgtctgttaaaagccatcactcctcagatgatgttaaaagtcttcactccacatcttctgaggagttgtcaagtgttcctgcttctgaccacaaggacagcaattggcctgtaatatatgtattccttgaaaaagtaaggagttaatttgttatgcttgtgtagactgttactaattttgtgtagttttactaaatgattggatttagtagaatagacaaaccttaccactctttttttttattcaagacagtcattcctaactgatcaaggttttgctgttgaactgggaaaggaccttggaatcataatatagtgctacacgattctattagcagtgaaagaaataaaaatgtttttactatcttggcttcctccctttacgctgtaaagcagccctggctacctgatgtcttcatgagttgatattctaaataattttaccctcaaatagccatataatagtaagatttggttgaattagtaacagagaaaatatttatagttaaacatctgagtggccacttgtctgcaagtactgtcataagtactcattaaatcctattcctgtccacaaggattgcaagggcgcaaacagatgataagaatcagtgatcactcactgattgtgtccttgcagtctctgggtggctgcagggcacaaaggatagcatgaacctcgccattggctgcagggcacaaaggatagcatgaacctcgccatcctcaactacatcattggcttaagcaggattttataagacagtctggatacctcactgccaagttccaaatagcagattttgctcactataaaattaatgtgtctgctagaaaaatggaaacacagagaaaagtatgacaggaggctgggcatggtggctcatgcctgtaatcccagcactttgggaggctgaggcaggtgaatcacttgaggtcaggtcaggagttgcagaccagcctggccaaggtggcaaaaccccatctgtgataaaaataccaaaaaaaaaaaaaaaaattagctgggtgtgatggcatgcgcctgtaatcccagctacttgggaggccgaggcaggagaattgcttgaacccgggaggcggaggttgcagtgagccaagattgcaccactgcactccagtctgggcaacagagtgagactgcgtccccccccccaacacccccccccccaaaatgaaaagtatgacaggaaaaacatccgtgatgttgttaacaaaagactcacaccacccattttaacgtgatccttcaagttgttttgctgtgcacttaaaaaaaaaagttattagtgcaccaccgatttctgtcctgctttctttacttaaaattataccataagcaacttctcatttttaaaacacatttttctaaatatatattttaagaatgtatttacttgttctctaatgagttagtattttttactcttacagtgttcaaacaactgtcacatagtttcttggcatccataaattttctattttttttaacgctctctcagcagaatcaatattcttttcaaaatactgcctctaacttttgatctgaacccttgttgttctcaaagtgtaagtcaggtgccaccaaacccttccagattcttctcagacctggttacttttgatttttcagcagtactttaaatacatctcctattagccgggcgtcgtagcatgtgcctgtagtcccagctattcaggaggctgaggtgagaggattgattgagcttgggaggtggaggcgccactgagttgtgattgtgccactgcattctagcttgggtgacaaagtgagacccagcctcaaaaaaattaaaaaaataaatatatattctatggtatttatcacataattcatttatgatgacagagtaggtgaaattaggaatcatatcaaactggtttggattgctgtgtggtatcctgcctatcctttatattctgtcccagcatcagcagacccattatttaaaatatatatatattggctgggcaccgtggctcacgcctgtaatcctagcactttgggaggccaaggtgggcagatcatctgaggtcaggagttcaagaccagcctggctaacatggtaaaaccctgtttctactaaaaatagaaaaaattagccaggcgtggtggcacgcacctgtaatcccagctacttgggaggctgaggcaggagaatcgcttgaacccgggaggcagtggttgcagtgagccaagattgcaccgttgcactccagcttgggcaacgagtaaaactccatctcaaaaaaataggtatatctatatctgtatctatatctatatctgtggatatatctactgcttacgtcttctccgtggtgctagatccatatcaatcctgagactactgacattggtttgattgttccttagtcaccttttgcctatattttgaaattctgagattctgactttgatttaattttagtttaggatattactgatttattctctgatgatcttgtttattttcttttagaattataagcagaggctaggagtagtggctcatgcctgtaatcccagtactttgggaggctgaggtgggaggattgcttgagcccaggagtttgaagccagcctgggcaacatagtgaggccctgtctcaccaaaaaataaaacaaattagcccagtgtagtggcacacacatgtagttttaactacttgggaggctgaaacgagaggattgcttgagccctggagtttgaggttgcagtgggctatgatcgcactactatgcttcagcctgagtgacagagcaagaccctgcctcagaaacaaacaaacaaaaagcaagcagagagactgggtgcggtggctcacgcctgtaatctcagcactttgggagtccaaggtggatggatcacttgaggtcaggtatttgagaccagcctggccaacatggtgaaatcttgtcctattaaaaatacaaaaattagccaggcatggtggcatgtgcctgtagtcccagctacttgggaggctaaggcaggagaattgcttgaaaccaggaggtgaaggttacagtgagccgagatcgcgccactgtactgcagcctgggtgacagagtgagactctgtctcaaaaaagaaaaaaaaaaaaaaaaacaagcagagaaataaaccatattgattacataatgagagtgagcacaaccttgagtatgtaacaattgacattgacaaaattgatccagaaataaattttagctttgccttttgccatcttcctctcataagtttcagactttttcatctgaaatttgctagttttgataattagcttagatgctatgtggaatgttggtaatgaacctacctctagatttacttgcttggccctgactgctctcctgagcttagattcatgtattcaacacactacttattatttccatttgaatctctgataggcatctaaaactacttgtggttatccctttccctttgtctattctgcctctaatcctgtctcacagtaataacaggttgaacatcccgatccaaaaatatacaatgcttcacaatctgaatgttttggagtgccaacatgatgctcaaggaaaatgatcattagagcatttggattttggatttttggattagggctgctgaagtggtacagtgcatatattcaaaaattaaaaaaaaaacctgaaatacttctggtaccaagcattttggattaggaatactttcccttcttcccacctaatctttcaagccataaacttaaaatccatccctgatatccataatctatcactttcaagtatactatataatttatttaagtattatggctgttagtatttcagctagaccataaactccaggaatgcagggattttagtctcttttactgatgtattccatgcacctagtacaatgcttggtataaagttctcaataaatatatgttaaatgaatgaatgaatcaatcagtctacattcctttctgttccacctgctcaaacaaagtatcttgttactaccgtgttctaagccaccattagttgtggccaagatgattgcagtagctttgttttttttttttttttttttttcttaagagacaggatcttgctgtgttgaccaggctgtgatgcagtggcttttcacaggcatgatcatggtgccttacagcgccgaactgttgggcctcttgccttacgctcccaagtagctgggactgcagatgtgagccactgtggcctggcatgatagcttttaactaatctctgcttctattcttgtactcttcagttcttattcttacaaagcaaccaaaatgatctttggaaaacattcgatcttttcacactcctgcttttaaaacttccagtaggttcccagtcatgttagaataaaaccctaagtccttaccatgccaacaaggacttaaatgtgtgttgttttaagctgttaagtttgtgatttgtctcttgattaattcagataactgataaattacctagccagatcagtgttaccctattatattcactggcaccccttattcttcagaggagggaattattcagggtgtgtacaccaagtacaggaatactgagagccatcttagatttgagtccaccctggctggatgcagtgacgcacgcctgtaatttcagcactttggagggccaaggcaggcggaccccttgagcctagaagttaagaccagcctgggcaccatggtgaaatcttgtctctacaaaaaataaaaaattagccgggcatggtagtgcatgcctgtagtcccagctactcaggaggctgaagtgggaggatcacttgagcctgggaggtaggtggaacctgcagtgagccgagatcgggccactatacacctgcctaggtgatacagaccctgtcttaataaaaagagtttgccctgtggccctcaaggattcacatagggtccactttcgttaacctttgatacctagacatttttggaagtgcttctttcttattcgtttattttttcatttgttagcattgttactgaccctccaattttaacaacattttcttgtttctattggatagttactaaataagaaaagcaaccctcagaattaaacccagtgctgacaaagtccatagtagaacatacatggtatgtgtttgcttgagtttttaagtattacttgaatcatataaaattatttttcttttttaaggttaaaatatacttgaatatctgtaaatctggaatttcatgtaattcaacctattaagtataggtaagagtagagcaaggaggaatgccattttctttttctttctctttttttcttggtggttggggattggcaatgatattaacagaattcaaatggtgtcatgtataagtaaaacttccttcctcatatccactgtagtgctccttttagttgagcagaccagcttttatttagttctcaatatctgtagatttggggaaataaatgacctgaaggaagaactaggatgatacaaaatattaatgaagggaaaaatacttgacttatctattctgctgcttgaggagcataaagtatagaaattacccacataagaaaagctttgggatctttcaaaactacccagaattgaactttgttatttctgtgtatgagttgcagctgctgaaatgttttgagatgacctcactaaataaactttatcttgggatttagaaaataagggatgtcacacatataaaccatgtgccttttacctttataggaatcatttgttgctgaaaaattaatttacttgataggaatcctggagtttcctgttattcttttagtaactgattaattactatactttttaaagcagtatgttttcattcatattatataaaatatatagaataaaaacagtggtttgtgtgtgtgttatatttaacaatatatctattcagtcaatgcctgtttgtgtagaatccagtcacaagtctatatctgagtatttatagaaagtttggccaggtgtggtggctcatacctataatcctggcactttgggaagcggaggtaggaggatcacttgagtttcagagtttgagaccagcctgggcaacacagtgagaacttgtctctacaaaaaaaaaaaaaaaaaaaaaaaaaaaaaagagagagagagagaagaagaagaaaaattactgggcatggtggcatgtacgtgtagtcccagctactgtggaggctgaggtgggtggattacttaagcctgggagatggaggctgcaatgagctgtgatcacaccaatgcaccccagcctgggcaacacagtgagacccgatttcattaaaaaaaaaatgaaaaagcaagtttatatttgatgatgatcatgagatacccctagagccatgtccacactctggctgcctgtgtttttaatataccaatatatggtttatttggcttgtagtgtgtatgggaagtcaggacaatttcatgcagaaagccttatttttggttactcttgaaaattttgaagaagtagcactgcttatctggaattcctgcatgccagtacttgactacaggagagtatctcagtatctgctgccctctggggagtggccattctcttatcgttttccatagtccctaatctctgttgtttacatctggccagttttttcccattttgtttcctccagggggtatttctcttgctctggagtcatgtaagaatgatcatgttaaggaaactttgttttccatattttatttattatttgaaaattgtggtttatgtatgatagctcttaattggccagaatataatcaaatccaataagttagtgctagataaataaactttatacctaatgactaatcctaatttgcatgatctttatggtctaccttaaatttttaaaaaactctgtcaagttaatattggtcaccaaccaccaaatatcattaattttataggagattattttttggtggaaatcttgaatgaaaattcactagctacctgaagtttccactgagtcaaaattttagagcttttctttcttgcagcagtatttctttttaaattttctttcttctatgcagagtaacagtataataccaatgtaagtgatattttatcacaggtgttagtagtttgcttgtttttgtctttaatcttgtttttgaggtaggtggtgtggaagaggattaaaatacacgttcatataagtacataaaacttaaaggtagagtttaacaaataattttaaagcaaaaaaaaaattttaaaccagctttaaaaaaatcacatgccctttctgtcataatttcctctctccccagaaataatactatctgccttttaaaagtcattttcctgcttctctttatagtgttgctaaacatgtgtacatctattgactaatacggtcaagttttgccggttttggatatttggataaatggaatcatactttatatattcttcttaatcttttactcagtaccatttgtgagggtcatctaaattgtgttatggtagttttttattctgtttctgtataggaaaattttcagtgtatgaaaatttcattattgatcaattctgttaatgaacagttgggttgtttccaatttttggttattaaaacaatacaactatgaacatttttgttcatgtaccctggtgcacgttttcattgttttcaaccagaggtatacctaggagtggaatggctgggtcatagggcatgactgtttccaagcttaccagctactgccaaattgcttcccaaagtggttgtaccagtttacatttctaccagcaagagaatgagaattttggaagccccacattgttaccaatgcaaaaatataatatctgtaagaagcaaaaatgtttctcgggcatattttcttttaaatgcaataagcagtacacacaaacatatattgcactacaagaaatggttgatgtattttgcttaggattaatattatagaaaagacaacagtctgtttagctttggaggtagttaagtagttgctgttttcagctgttctacacctctgctccctcccagccttcataattgagaaggtagcaatatctttcaaataatgggaaaacgtacttgttttctttgtatgagaacttgttgctactccctttaaagaagatggatttcaacagtatgacctgaaattgaacagtttaccaagagagaagaacccttagctagataatagaggattcagtaatcattaatttaggaatattttgcaagaggtatttaaattttagtgtaaatttgatttttatctatgacaattttattagcctttgtgccatttctttgggataggattgtgctatttctgttctgtataatttctagtaaaagatggtatacctttttccctggcagagacattaagccctgtaacaaatacactaaaagcgaatatggaatgcctaatgcagtgtgacatatgtaatagaggatcttatttgaattgaatagagcacagtgaagctgagagatttttattatatgtaacagcctgtttctaggaagaatttcttagaaattctagttcttctattattttgatacagacttattttctttggcctgcttttattagtagacatccccaaatttaggaggaagtgcctttttagaatatctgataccaaaggattaccagtttggcagaactatttagagttgcaaaggatgcataccatagggatatacccctgaaagttgtttttcattggtgtttcctttaaggaagctttttatgtagaaagaacagcactttaggctttggcacaatgctttttctctttctctcaaacatttgtgttttatggggcaatataatagttttctgacaaaccaatggatactaattttatgtgtaataatttaaattgttctttcagtattctttagtatatgtcagtacctctttacagttctgtaagaaacatagcttacagtctttacaactctgcagatgtatttttcctttattattcctaattatttcatatatttctgttgatactagtgtacaggtttatattttttatgtatttagttcagttgtgttacttcattttctcattggttgctatttctacctgtttttgccatcatatgaaatgcactggatatatctttaagttcctaatttttgaggtgagattttctttagggtatgtactctaaagtgaaataattttggggtgatggttttgaagcacttggtgacacattgctctgtaatcctgggaagatagtaaagtaacccattcacagtattttatctgtgtcctgtttccttagatccctgccaataatggggcaaagattttattttaacttacttttgttagtttaattgataaacatacaatgtattttaatattttttatcaatagtattttaaaaatttactatgatttaattgtcatgggcaaatttggtatttaatttttatcagaataaatcataaaactggtctaagatagattttatatagttaacttctttgctctctttttattttcactttatttcactgtacagaatttttcccgtgttaaaaatgtgtattcatattgaggtttttactttagcaaaatatcaaaataattaattctaaaacatgggaaataatataaattcataagctttgttgtaagaaattttcttataagagctcttcatttctgattattaattttctaaagtagatgtttaaatagcaatccaacttttctcctttgaaaaatttccttggtgagatttatatatgctgttacatttcatggtaaactttatgcctttataaatgtaatagtcactcaaaattggaaacaaaattttcccaagaaaatcataatcaaagttatttaaaaaacaaggatgaaactagatacaattattttaagtgttaatctttggtcatatggtagcatcatttatgtgtcttttaactcgtaagcttttggttctagttagttctgtgtgagtccatttgatttcagtattgggatcaggtagctgatcctgaagatgtttatatctgtttagagagttataagtgatttgaaggttagagtaccagggactagattttcttcagaccttttgactgagtgaattccaggccattttcctttttccctgagcagagtttttaactttatgataaaattcagaagacctatgaactgaaaatagagaatatgtctaatgatgaattttagcatttctttgcattatgaatatagacaacaattgccattagttattatttttaacgcaccactgaagaacatatattactatgtcaggaatttgtttttgtttttttctttttcttttctttttttttttattgatcattcttgggtgtttctcgcagagggggatttggcagggtcacaggacaatagtggagggaaggtcagcagataaacaagtgaacaaaggtctctggttttcctaggcagaggaccctgcggccttccgcagtgtttgtgtccctgggtacttgagattagggagtggtgatgactcttaacgggcatgctgccttcaagcatctgtttaacaaagcacatcttgcaccacccttaatccattcaaccctgagtggacacagcacatgtttcagagagcacagggttgggggtaaggtcacagatcaacaggatcccaaggcagaagaatttttcttagtacagaacaaaataaaaagtctcccatgtctacctctttctacacagacatggcaaccatccgatttctcaatcttttccccacctttcccccctttctattccacaaaaccgccattgtcatcgtggcccgttctcaatgagctgttgagtacacctcccagacggggtggtggccgggcagaggggctcctcacttcccagtaggggcggccgggcagaggcgcccctcacctcgcagacggggcggctggccgggcggggggctgacccccccacctccctcccggatggggcggctggccgggcagaggggctcctctcttcccagtaggggcagccgggcagaggtgcccctcacctcccggatggggcggctggccgggcgggggctgaccccccaacatccttcccggacggggcggctggctgggcagaggggctcctcacttcccagtaggggcggccgggcagaggcgcccctcacctcccggacggggcgggtggccgggcggggggctgaccccccaacctccctcccggacagggcggctggccgggcggggggctgacccccccacctccttcccggacggggcggctggccgggcagagggactcctcacttcccagtaggggcggccgggcagaggcgcccctcacctcccggacggggcggctggccggggggtgggctaacccccccacctcccttccagacggggcggctgtccgggcggggggctgacccccacctccctcccagacggggtggctgctgggcggagacgctcctcacttcccagacggagtggctgccgggcggaggggctcctcacttctcagacggggcggttgccaggcagagggtctcctcacttctcagacggggcggccgggcagagacgctcctcacatcccagacggggtggcagggcagaggtgctccccacatctcagacgatgggcggcctggcagagacgctcctcacttcctagatgggatggcggccgggcagagacgctcctcactttccagactgggcagccaggcagagaggctcctcacatcccagacgatgggcggccaggcagagacgctcctcacttcccagacggggtggcggccgggcagaggctgcaatctcggcactttgcggggccaaggcaggcagctgggaggtggaggttgtagcgagccgagatcacgccactgcactccagcctgggcaccattgagcactgagtgaacgagactccgtctgccatcccggcacctcgggaggccgaggctggcggatcactcgcggttaggagctggagaccagcccggccaacacagcgaaaccccgtctccaccaaaaaaatacgagaaccagtcaggcgtggcggcgcgcgcctgcaatcgcaggcactcggcaggctgaggcaggagaatcaggcagggaggttgcagtgagccgagatggcagcagtacagtccagctttggctcggcatcagggggagaccgtggaaagagagggagagggagaccgtggggagagggagagggagagggagaggagggagagggagaggagggagctaggaatttgttttaatatttttatacctgtatttcaatatagatcatttgttgtcataatcctatgtattttatgtatttaataacacgattctgagaagtctgtattttatgctagattggcaaagggtttgtgttcctctcaaatttaagaactattccttaaggagaatgacttctttcattttagcagaggacagaactgcccataattcatgaaagtttgcaaaaccatcagtgttaagtctgcattagtgtatgagagggaagagctggctaggattgattggtagacacttccactaggggtctgagtaaagtggtttcatatccgtaatgggctgatgagcaatttattgcctgcaaaaaacggagaaaatgaaatttttggttacgtaaaaacatgctgattatttttcagttgtataaatttgtgattattgtattatattagaaaatataaatgagaaaataaatacctgtaatgctttctgttaagattttggtatatctctttacagatctttaaaaatattacatatacatgtttttagatgtatgtgtgtgtattatatgcatacgtaaacaaataatgtatatagaaatattcctacacatgtgtatgtatatgtatatttagatgtcctttttaaaaatttttttgtatttaaagagatagggttttcctctgtcactcaggttgtagtacagtggtgtgatcatagctcactgtaagccttgaactcctgggcccaagcagtccttttgcctcagcttcccaagtaactatttctacaggtggatgccaccatgcctagctaatgaaaaaaaaatttttttttataaaatacagttgaagtcttgctatgttgcacaggctggtctgaaacttctgttcttaagcagtcttcctgtgttggcctcccaaagtgctgggattacaggcataagccacagcatctggccagatatatgtttttaaagacaaaaatgagattatgtcgtataagtaacttgccatttttggagtttagatttattgagatgtaatttagtaaaattcaccctttttagtgtatacgtccataagtcttgacaagcagagacattcaattctcactataagcatgatacagaacagttctgtcaccctcaaaaatctccttgttcctcttctgtagtcatctccttcctctttcaaccatttatttcttttctgttccttttacaaaatggtatcatacagtttgtagtttgaagtattgtttctttcctgtagcatgtgttttcctttatgatttttggttttgagatcatgcttcaagaatcttttatcaaattgatgagaatattcatgtatatatttttaaagaattctgtttttttcaattttaaaaattttaagtgtttgttcagtctcgtgcttattttagtgtaagttgtgaggtaggaaatccaattaaaaatcagatagttcagctgtatttattaagattgatttactaatataatgttcttactaaatattgatttcctcacaggtaacacaagtggcaagacagccgggaacccctaccccatccccttattcagcacatgaaataaacaaggggcatccaaatcttgcggcaacgcccccgggacatgcatcgtcccctggactctctcaagtaagataaaccttttttaaaaaaataagaaatgtccctgtaaaggcatcatttttgtttttctaaagagactcctaagcagtaacataaaacattacttgtatagtaatttcaagtttgtctttggcatcttttcagacttaaccgttcataaagatggctactaacaaatttcacacatttcattttgaagtcattaaaaattaactgttggtgatatttagttttcattttcattgtttaagaagttagagttttattctaaagtttactggaaaacccccccacaaagcactgatttgcttttcgatgcttaatctgctaccgtctcgcacccctttcgggtgaagcattaatggttattttctacttatgtgaaaacttggtgtcttcccctcttgagtagcatcagtgggattttttgtttgttggtttggttgttttgtaagtcgattattgtaatttgataggcttaagtttttgttgaactgttagaagaattgtgaactccttagtgtatttctacttaatagtaacaacagacgttcagacactgtttaaggaggatgttcctatgtgttccttgcacttaagctgtttgccaagatatattgtttagcttgcaccgacctactgttgcaagcttgtttggatttccttgtggttaaaagttggctagagttataaagtcccttacagaatgtggactgagtcaagccaataacgttgatctaactgtgtgagattatcagtatttacatgtaacagctactcttttgataatgaaaatcatttttataacattatttgtgattttagcctccatattttaggccttttagagattgaataataggagagatcaggaattactaaaaataatgctaaaggtggtgattataagttaagggctgattttattttttattcttcattattttttagggacaatttttattccttattatttttttaaagacagggtcttgctccgtggccaaggctggggtacagtggcatgatcatagctcactgtaacctctaactcctgggctcaagtgatcttcttgcctcagcttcccagttagctgagaccacaggctcatgccaccatgcccggctaatttttttcttttggttaaattttttgtagagatggggtcttgctatgttgctcagattggccttgatctcctggccatgtgctgattaattatattttagactatagaatgtttggaaaaggaatgtacagtttgccaaaccatgactgaaatagccctattaatgaatataagtttgtcaagaacttagtgctatacctaaacttagtctaaatcattcctatataatttggagttttaaacattgaaaacaaaacaaaatgagctcctgattgtttaaatgaggttcctgtgttgggtttcttagactgaacacaacctctcaacttactattaaggtgtattaatctgagtctaatcaggagagaaaaactatgcactctcaagaatataagatataaagagcaaacgcttaccttagggctgagtagaggctcagatagggagcctttctctgtagggttgagccaaaggctgtggtagaagagccactgtggtgctgttcagaacttgctgaaactctttgttctggaacttgctggaaatgtgccctatgaagtattggggaaagctttcttctccagcaccaatctcttatagccaagagctgatgcagggcacaatggctaaaaggctccttactgcatatctgtttcccacagacaattcaaaacattagatccactggatcagaagtcccaagtggtagagcagcttgcactgcccatcccaaatttgctgtataaccttcgtatattgtgttccctactcaaaattggaaacttcctaggtgactctgtagtcggttaaggtggcacattcagatgtagtatatatgttgcctctacatccaaaaaaggcctaccaaacctacgtcttattttttgtggtagttttaggtgagagactgctacccctaccctgggctaagatcttgaccttgttggagagggcacggtgtggctttctgaatgggagtggtgccatttcagtggaagttactgaaaatccaccctcagaacttgtgagaattctgccctctagggtgccgagggaaagctgttcgcagggaggtttcttagaaaagccactgtgctgcgtgtcttcctgagggaataccaggggtagctcttggctgctgggtactgttgcttgctgtgcactgaagcagaaatcttgctctgatgaagctatgtccatgaggggagctagtcactagagaagccatcttttggagaagctatctgggctgcaggagcaaccaggaaccaggaaccaggaaccagggagcaaaaccctttccttctacatatctctagagccttctactgacaaaacttaatgttgtgtcagctgaaatgttaaaatatttatagagctcagatccattttcttattacaggcaaacagtgaattttgatatgaaagacaagcagttgataactggcatgtaagggaaatagcttagttttccatttgaaattcttactgtttcaagttgtgatttgacccaagcagttggcccaaaggacttaagttttctgaaagataggctgctcgcaaatgcatagtttgcatttaagaaaagatggtctcctagcatctcacttgttaaatcctcaagtgctgttctatatgccattttaccaggtgcctttagaaaccagagtacatgaataccagggagaatggccaccaaatattgtgttgcattcttttgtggtctgttttgccaccattttgcctaatctaatgaatgaacccagtaaatcacacctggttcaatgcccttttttcccctccatcctttcagacagagggaagcctctatggattcatctgtctcctagcaatatgttaacacttgttgatatggtgaggaagtttttctaaactagcatacctggaaaaatgaagagttccatgggaaactcaagttttttttaggtttcacagttgaaacagtttgtaggggcagatgcaaagcttcccttctgcccactctgagggtttgctgaaatgctgatgatagattaataggagaaaaaggcatacagatttatcaatgtgcgtggacacatgagagtcctacacatatgaaacacgaagaagggagagaaggttgagggcttgagtaccctcttcatagggaagagggaagcagggtggggaatgggctatcgggagttttagaggggaagtaaatggtttttaggtgaaatgaatgagtccaaattacaatagtcttagacaaagttcctctgagctcctgggaggtggcgggaaggtgaggaatgagacttcagtgtgaacaaaggttgtcttattatgaaggttaaatctcctaagagttacccccaaaagtaaaatgaaaagtctgtcttgatgtggtgatggctttagtctcttctgttttccatgattaatcttttgtgattatttgatgagcttccatgggagggtggtcttaagacaattgtgtttcttttggaaagacattttcttagtcatatctctgtgccccaccaagttcatggatggtaatggaaagaagagcgttcaaaatagaggggaagggattataggcttgaagtcaaaccataggttctagggctggctttgttactttctggttatatgatattggataaattatttaatatctctggaacttcgtttcttcatctgtcatatagggggaaattagaattctactgccctgtaagagcgttgttatgatggttgtgtaaattcctgcctcagaacaggatttcctaaatttagtaagtgcatttattatttgtattcctgccagacttggttctcctcaagatttatatatatgtatgtgtgtgtgtgcatgtatccttgcctgctaattcttttatttggctacctgtcgagatttagtgtgaaacttagaagctatctccaagagtttgaaatgtcttccatgtcttttctgatgttcggataaaagtaggatattaggcttggttattttctgttggcggtaatttgttttattcttctatacaaaacagattcagtcaactgaggataagatcaaagaaactattttttagctacatgtcctttttgatgtgacagtctccccttcttctgtgaattaaatctttttgtccaaagtaactacctatgtctgtgactcaatgtttgaccctcaatctactaaggtctaagtgaaagaagctaagctgaagaaaagtgaacttcataactttgaaacgtgaaagagggaaaatgaagaatattgtttccaatgtcctctgcaatctcattacctgcttctttgttaagacaggattttacacatccacaggtgcttcaccacacctgtgtatgtgccaagttttaaggcgtaatgtgcatttcccttttttacatgagctgtagttctttctagcttcgtcctctctggagattttgtttaattagtcaaagactttagactatgacatttcagacaatggtaaattggtgagacagagtctttataggcatagattcttttcagtttccctgaaatggcaacacttttgaacaatcttgaaacccagcatgtctgttctctgggaagagtaaatagtttggaatttaaaagtaccttttggtggcagattgcaaagtaaatctccctggggaagtgcactctagggagtcaggagaagagactctctaatttagagttccaaccctcctaccactgttttataatttaacctatggaagttcctattaatgcccagttttcttctttgtgaatgagcagcttttgttagatgagatcagaattttctttaagacttccgtgggttttggacactaacttgaaagtagccagttgttgttatggaaaattataaaactattttagatttaaaattacccaaactttgccttgtttcattctgtttttttttttaagagaagtttgaattatttaaaattacttctcaagataagtaaaaacaaaagagactcctacttattgcttaattggtgatgcacatttgctttaacttagttaattttcacgaagtagcaattacaaaacagaccaaactggcgctgattaactaggatcaaaatctaggtcttttttctcttggcatcattgtctagacttccaggcttttggagctatattcacagtaattaagtgagaagacatgctcaaaatgatgccaaagaagtgaggtaataggtgttatctgcctgctgtttctggatttcatttggctctctgtttttttctgggagaggaactccttctatagcatataatatatagtagctgagatggtgatggtatatgatccactggttagatactttattgtctctggaaatactaagcagagttcttcactgaggagtattgcttgatcgtgatgcttattgttacaccacaattttcatcattagtaaaggatgagtttcaaatgatgaatggtcccaacacccatttttgctttatccagcttccgggaatcttgttttatttactaaggagaatttctctgtgttgtctcataattgttcattgactgactgctccagcctttgtaagctgtttttttatttattttttatttttagagacaggacctcactctgtcacccaggctggagtgcagcagtgtgatcatagctcactgcagccttgaccccctggactcaagcagttcttcaggtagctgggactgtatgcgagctccatgatggctgactaattttttaattttttgcagagatgggacttgctttgttgccaaggcaggttttgtttctaaatcctggcctcatacagtcctccagcctcagcctcacaaagtagtgggattataggcttgagccatggtgcccttctgagaccctgtctctacaaaagatgtaaaaaatactagctaggtgtgatggcacacacttgtagtcccagctacttgggaggctgaggtgagaggatcgcttgagactgggatgttaaggctgcagtgagctgggatcacaccattacactccagcctgggtggcagagtgagaccctgtctcaaaggaaaaaaaaaaacaaaaaaaaaaacgaatgaagtttaatagtgatttttccttactacatatgcttttttttctttttgttaccttttgtgaagaatataaattctgagtttgatgcacacttgttaaccatgataaagtagaggaagctgtgaaaatttgctttaagaaaacatcacatttcattgttgaaatagatgagtatggaatttaatttaaaaaaagcaaaatgtatagtttttacactccccatggcccccactttgaaacacatcatgtccatctaaggcagtatttgagcttaccaggattctttagcatatcacaaatataaatatgaatattttataggcctttgtaacttttaatgacatttgcaaagtcatgttatttgtaaagtgtttaatgacaatatttgttgacacttttaaaaaaaagtagatttttaagaacttacacatattatcaacttaaaaaaaccaaatggaggatttgtcaccaaggggaccaactcagtgcagtcagtactgcaggtgtccaaacccacaccaagtccccatgtaccatgaatgcagcttccaaagaatcatggtaggcttttctaattgttgagatttattttaatgtgatacttgattggaagagtgttcagctcttttggtcattttttgtttttatttaaaaaattagttgcaaccatatttataaagcaaccttgaccaaatgtttttctaataggtgtttcatctctctctctctctctttctttccatccttcctttttttttttttgcgccaaggtttcactctgtcacccaaactggagtgcagtgtgttttctgctcactgcagtctccacctcccaggctcaagctatcctcctgccttagcctcctgagagtagctgggactaactgactttttgtatttctttgtagaaactgggtttcctcatgttgctcaggctggtctcgaactcctgagttcaagcaacccacctgccttggcctcacagagtgctaggattacaggtgtgagccaccgtgcctggcctaggtgtttaatcttttatgcagtcctgtaacttaccttgaaatgtgcctaaagcagcttttatatgtttgattatacttctctttgtattgcctgtagccgaaaagaattccatttattttcttttgacatttctgtggttagtttttaaatgttgctgcaagagtgatggttaagtacaattatttttcagacttctcaccctaagttttacattctgtttggcaaattcacatggctggaacccacattttatctaagtattaattcagcactattacagcaagctaaagaattttgtaagaaccaaactgattgtgattttgtaagcatttctttacttctgttttatgtaggctcagtcttttgttgatgatgttcattttcacttaaatcctgtcaaaggcaaaaggtttaggattttgtcttttacatttgaacagctgtttcttttggatgcatcctgggagactcttgtttatttctctggctacctctcatctgttttaagaagtcatgaaaaactctgtcagcgtttttcttgccagtttacctcttgggaatatcacacttcatttatttcccacagatttgggggaaaaactcactttagtgccactaatttattttttatctggttgtgacattcagatttttagatttttatggttctgaaaattgctaattcagttcagctgcagagattagcatgtgtcagtaaattttaggatgagaaacagaacaggtaagttttaagaataatgaagaaattgtgcagtttgactcttcaatttaaagtgcttgtgatagttcctgcaaaaatgtatatgtgattcagagcgtgttgtgggggaagtgagcagacagaactctgagggaaagctcagcagagaggttaagtaccatagtagacatgtataatattgtcttgagtttagtcaggcaaatgggtatatatgtcttttcagatttattgtagtggacgggagcatgctgattgctgggagagaaatgagaagacaagcttgattcaggactgtttttataagggatcaaatgaaaaaatttacttaaaagtcacaaactataaaatgtagtgtacaaaggctagctatctttatagaactaagaactgtgaatttcagtgactcagcaatcaataaaaagtcaataacacacacatcttgtagatgatggtcattttaaattttctcaatgaatagtaaagagagattaacttagttatatttaaagcaaatagaatcaattaagtataaagaatgaatattataaattgatatatagaacgactattagaaaataaaaatgttgggctgggtgaggtggctcttgcttataatcccagcactttgggaggctgaggtgggcagttcacttgcgctcaggagtttcagaccagtctgggcaatgtggggaaaccccatctctacaaaaattagccgggtatggcggcgtgggcctctcgtctcacctgattgggaggctaaagtgggagcatcccctgagtccagaaggtcaaggctgcagtgagccatgcttgtgccactgcactccagctttggcggcagagtgagaccctgtctccaaaaaaaaaaaaaagaaaagaaaagaaatttgttataatttactcactaaaccaacaaactttttttctcagtgcatacatttatttacgtttttttccctctaatgtctagtcatgcttataatgtaacacgaagggctaagtctgatttccaagcttttcatcagttgatggacccttttctctgtgaagaatgatgaactctcaagctatctaaattctgtctcccttgtgtgtgtgttctctgtaaagtagtttgtttcatagaaaacccctaagtaggtgacatattgcagaaaccatgttgccaacattttgttatacttttcatgtaaaacatatttccatttctcttcactgccagtgtttctccagtttcaagtactacactatattattcaaaattctgtttattactccacatcttactactcttaatcaccatgaaaattgcccatcttcttttatagttcagtttcaaattttcacatgcctgtttagtgcagttgtcatagtcttagtaagaaataaattacactaaactatttcaaatggagaggatttttaatacatgaatttgttatactggctgaatgattaataagggggatgctgaggctgggcattgtggttcacacctgtaatcctagcactttgggagcctgaggtggaaggatagcttgagcccaagagttcgagatgagcctgggcaacatagtgagacttggtctctacaaaaaataaaaataaaaaggaggatgcggaggtaatctagagattaataactgcagaaagcagctgacatccctgagagaaagtcaggaaaggggaaatacaaagtaaatgtgataagacatctggactgtgaaacatattcataactgttaaaattaaaatgtagtcgaattaaatttaaaggagtttaattgagcagtgaatgactggtgcaggcatcccccagaatcacggcaaattcatagagactctaggggtaccttctgatcagaacaaatttatagaccaaaaaaagggaaagtgttaaaaaaaaaaatcagaagtgaggtacagaaacacctgaattggttacagggtgacgtttgccttgtttgaacactcagcagtctatgattggttgaagtatggctgctgggattggccaagactcagctgtttttacagctgcatactctttaggttttcagtcttgtctgccttttaagctgagttagggttcatccacagggactcagatttaaaagtacggagtccttctcagaccatatttagttcgctttaacagaactgtaataacaacacagttaaattatctcaattcattggtcaaatctcaactcaaattggtcaaaaaccaaaatctaggaatatgcatttaaacttgacacagaaagattaaaaacattcctctagactgccttcccaccccttcagataccagccatacgtcccggcctctggaacttttgactgactggcttcaatttggggatctcatgatcccctctttgggtttgataaatttgctggagcagcttacagatctcaggaaaacatgtttacttgtttattataaaggatatcacaaaggatacagttgaagagatgcctatggtaaggtatgggggaaggggcacagagcttctctgcccttccttggtgcaccaccctccagcaacttccatgtgtttggttacgtagaagctcacttaaccgtgtcctaggttttttggagacttcattatgtgcatgattggttaaactgttggccactggtgatcaacttgacctttagcccctctccttcccctgaggttgggggtccgactgaaagtcccaaccctctaatcatgcccttgtgatgatcaactctagctgtcagtcaacattagcatacaaaaagacagacgttggcgattctaaggtttttagaagttgtgtgacaggaatcaggatgaagaccaaatatgtatttcataatatcactgtggtggtgtcagaaactttacatgctgaggtgtgagcagagagagtgtatctataaaatgtttgcatgtcactaacgattattgatttagaacatcttttaaagtgcttattggccatttgtctatttttggagaaatgtctattcaaagccctttgcccattttttaattgggttgcttctttcgttgttgttgagttgtaggagttctttatatgttctggatatcaattccttatcagttatgtgatttatatatattttatcctatcctgtcaggtgccttttcactttgttgatagtgttctttacagaaagtttttaatttttggatttttttgagacaggtctcattctgtacaccagtctggagttcagggtgttggaaataactcactgtagcttccgtctctgggatacaagggatccccccagcttatcctcccaagtagctgggacgacaggcatgtgccaccatgcctcgctcacaagtttttaattttgataaagtctaatttatcttttgttgtctgtgcttttggtgtcatatctaagaaaacattgccaaatttgatgttctgaaagtttccccctatgttcctttgttggaattgtatacttttagctcttacatttagatctatgattcattttaaaaattttgtttttctgtgttctctcacagaatggaactatgattcatttgatttaatttttatgtatggtttaagataaaggcctggcttcgtttttttggcatgtggctatccagtttttctagcaccattggttgaaaagactgtcctttacccgttgaatagtcttggcacctttgtcaaaaatcatttgaccacgtatgtgaaggtttatttccgggctcttttcttttcattgctctgtatgtctgtctgtatgccagtaccatactgacttgattcttgtagctttgtagtaagttttgaaatccaggtttgagacgtttaggtttgtcctcctttttcgagattgttttggctattgggggacccttgagattccatatgaattttagaatgggcttttctattttcccaaaatttgtttttgggatttttataggattctgtgtatttaaaaaaaaatatgtttcataatggacacaacattctttttctaagtaggtgaagaaagcatcattgcttgagagtggaattaagatgtagtattcaccttaataaagaacttatacataacttttatagacactcccaagaactgggaatgttctagttaatgattcccttcgtaggtacttaaaaatctaatttgaagtcctagttctaagagaaacagagagagagaagaaagaaagaaattagtggagtaggaggtggtctgaattaggggtatatcaggacctagagtgaagattatgtctagtggtctcgtgtgacaaatgaatgagaactctggctagggatgttttagctgagatgtagaagaagaaactgacaggaaaccagagactatgtaaaggtgggagaaatgaggggaagaaattagtagagataatcgtggtggctatcagtagtaggtccagagagggtcctaaatagcagccattgaagtaggaagtggagagccagcattgcagacattgtagaatacttttgttgggaattcagtgaaccaacagcatctctttatcagtacactggtgcttttagcccacagtcttgggggaactggtcctgggattggagagaaaactgagttgtcatgctgtataagtaaaagctaagctttgaatagtatagttgcttttgagagaacacaagtagcctgtgatcaagctatcctattatgtgagtctattattgtcttctgaggggcagaaagccatagcatttcaatgttgaactaattataaagagtacaaaaatggtgatgatttcagtagtgtttccctgctccatatagtatcactgctcagaagtgagaaagagtttgatcagtggttttcatttctgccttcccacttagaatcacctgatgcctgggtccccttctccagagattctcatttaattgcttgggatgagcctaggtaatgctaatgtgcacccagcattgagacaaagctgtggaacagtgccttttccctcctctaatcccacagccgattaggaacagtgccttttgatacatattgcccaaatgatactttataggctttgtttgctgaggatggttttcactgaaaggagcaagatgcccccattttcagatcttatacaagcaaagtgaattgggctagtcttaatttagggaaagtagctctggtgattgagaagacatttctgttcagtagctaaaacagactgttacagcttttttacagataatatgctttgcatcgtggtctgtactcagaaggtttttacggtattgattttatatgccaatttattttggtgatagaaccaaattataccctgccaggtactatgtaattgactcttctgattcacccagaataagagtgggtgttttttgcttccatacaatcagatacgcctagatttaaagttatactatagtgttttcaaactgttaaaagcagccaaactgcttccccccatatgacgagcagtgcctgatccatagtaagcccctaaatagttgaatgaaaactagctgtaaatgaaattttccagaagtgtcactttttggctgtttgcagtgtggatgctttatttggcgcaatagcttttttttttttttttcctttttctgactggtactgttaattttgtacagttcagtaaaagtttaccagtacaagcttaacttaaaaagagccaaatactctaagccacccttagagaccttattctgtgagggtctgggaatcttaatattccagctgttctgtcattgtgaatcaaataattaagacttaattgctaagctggaaaagtcttttttaggatgccatgacagagatttaggtcttttaaaccagttcagtactatactgaatagagaatttcttactttttctgagtaggtgatctcattgtttagtatgaatatttctagaatgtaactcataaataagcttttattttattatttttttagaggtggagtctcactctgtctctaggttggagtgcagtggcacgatcttggctcattgcaacctctacctcctgggctcaaaccatcctcccacctcagcctctcaagtagctaagactataggtgcatgccaccacacctggctaatttttgtatttttttgtagagacggggttttgccatgttgcccaggctggccttgacctcctgagctcaagcaatccacctgcctcagcctcccaaagtgttgggattacaggtgtgagccactgcgcccagcccacaaataagcatttatatagagacatggtatggtggctaggtataaagaaataccatctctgtgtaactgattttaaatattaaggtgtttaaagaaaggtaatgagagatgatgattcatgctcttttttttgtactaacattacgggatctttggggtgtcacttttctggccagaaacctctgtggcctgtggcacctttgcctgagttcttgtcctgcgtccaggaagattgaggtatgcagacaagtgtagagtgtacaagatgaagaggagctttactgagtgtcagagcagctcagaggagacctgcagtgggcagttcctctctgtaggcaggtcatcttgttgagtgttcgactctcggcagagaggaggccctagagtgggtggctcctctcgtcagccaggttgtcccattgtctctgcagctctcagcagagaggaggcctgcagtgggtggctcctctctgcctttggtcgtcctgatgtctgttgctctcagccagagaggaggccctggagcaggtggcttctctctgtaggcaggtcattccagtgtttgcagctctcagcagagaggaggccctagagagggtagctcctctctacagctggtcatcctgatgtctctccttcctctgccctgctctggttgagcctgaggcttttatgggccttacaggggaggtggtgcatgccagttggtccgtgggcagcccagaaaaggcaccacaagtccccactctggtccatgggatgggtagcccacccctagccttcagaacctccctggcaaaaggtggggcctcactgaggactcgccccttctggcacaggagcccatttgcctcccaccactgcctatggcccccaggttacttgtgccaagggatgcccacaggctatcgctgaactgcccccctgccctatcttggccactctcctgtggtctttggcacccaaagtttggaggggccaagctggaagggacccagcgggtcagtgctgccctgagcctatgcatacctggctgggctgcaacagtgcccgggcttggccccaaccccaattggagaccagagcagatgctgggagtggggagaggccaggcagcaggagcagacacccctgagcctgtggtgacaggggctctcccaggcccctgagagcattgagaggcctgggcccacagccatgacctgagtggctggagctgtgcctggggagctcctgccctgccaactcaggaggggtgggactcctgcctgtccccggctgcagagtacacagccttagctgtgctccttctctgtgtcttcccatagccacggcaggtaaggtgcaggtggcatggtggccctggccagccctgcacaaatgaacctttggctcccaggacacggccagaagtgaggttgaggctgcagtggcctcaggcctgggagtgggtcctacccagctgtgccagggtgggggtggcacagttggcttccttggggacatgggcacaggggtcctactgctgctcctacagccactcctgctgccctgtcccgcctccttgccacctggggtggggctccaggccctcaccgggcctggactggcatccagggcaggggtgatgtcgttgcagggtccccctgcagccccagggctcccccttgcctggcttacgaccctgccagggtggcgcctctgggagcagattctgggcccaggcccagccaccaggagtgccaggctcagcagacaccctgacatggggcagatcctggggacacgatctccggtggtgccaatctgagcctactgccgaagtacgggaacctggtaccatcccagggccacaggccccatgtaccattcgccttggtgtctatacctgagcacctgtggcctgcggccgcaccccacctctgccagtgccatgtcagcagccactttgtatggtccatcactgcaatcactaagatagtatttcagtttacagagtattatgtgaaattggtttacttggcaaaattgtctcatactataattctgttttatagtgataaatatttttagagtttggttgatagaatggcatcacaaatacagctgttgaatgggtgatgaataatattaaagtgtacttcaatttgtgtagagtactgctcattaaatatctgtttttgaagtaacagagtaagaataattggatggtcgtaatgtagaataaaacacatactgtgacttaaatgaatgttttgagttgcttaaaacattcattaaaaaatttccaaaagttacaattaagtaagagcaatatttgtggtagataacatttaaaatacagccttttttattttcaagtactaatgtccctggtgttgaaaagagatcccattcagaaataaataatctctctactggagctcttcttgaagagtcctcaagtacagcccaacaattgaactgtgataaattcccagaaaaaaattttctttgttactttcagacagtctccctctgtcatccaggctggagtgtgttgtcataatcatagttcttgaactcctgggctcaagggatcctcccatctcagccaccctcacctcagcctcccaagtagttagtactacaggcacataccagcacacccagctaatttgtaaaatttttttttatagaggcagggtctcactgtattgcccaggctggtcttgaactcaccttagtctatcctccctccttggcctcctgaagcgctgggattacaggcataagctatcacgcgtggcctttttattcttattgatctaactagaaagattgatcatacagtattcccgatgttctcttcatcaccaccttcaaactataaactgtggaaaagaattttcagtttgctatagtataaaggctgcattacataaagtgaagtatgttttcaaaacagagacctggctgtgaatcacagttctatcacttactaattgtgagatctttcataaattgaaccttattccacgtggaagtcctgccatttgttcaatagaaataacagtgcctgcatcataggatgctaaataaatgttccttgcctgtcttttgttgcagtagctttggcgtatttaacttttttttttttaagttcagaattctagagaatgaattctttatctgctctgctgttaggtttcaatatcatgtttctggaactttttcttaactctttcatatcagtttatgatactttaatcatcattactgaaaaccagatgttactaataggtatttatatcatgaaatattatttcctaatattgttaaaagatttcattagtttgactcttaccgtatttattatgtgtgatttatttttcctgcattgttgtttaaaaaataaaaacaacaaaaacttacacatcaggtaaaactgatatatagagtagtttagaaatcccaggataaccactcagaaagtcatggtgattaccttgatgtcatctagaaacatagtgaggttactgtgtaaagttttccagaaatcattcagcagtgttagctgttaagcaaatattagagcacatgaaaaggaaaaattctgacttagtaggcatatctgttactagtttctttgagaagcagtccgtcattgtattatgatggatttgggaaagagttcaagtgctaaaatagttcataaggaaaagaattcatttctggtttatgtatgccagcttttattttgtgaggtggattatggcctcttgatcgttattctgtaccatattttcactcccttttttcactccgttttttttaaaagctatttttgttcataaactctgtagaattgtaggcagaagaaattacacatgacatctgatccattggtattgctttttgttagtaactcttcataaatagaattcaagatgaaaacatttgaagaacataacctgaaataatggtttggcctttctgaaaagtctggttttgcccagtcttattgtaaatcagtataagactttttttttttaatggctgaaacattttttcctaactaaatcaaataaaacaataatttttcatcttcaaggtagatatgaggaagaagatgaagagaggatgcactatctattaatatttggctagattaattgtatttgtttacattgaagtttgattcacatttatcccaagtcatccattagaaccatgctgaggattagatagactttgaattgtaatgtacattttttaatttattagatgagcagtgtcatgaggaatgaatagttctgccaaagataactaataattactatttttcacctttcatgcctatccttttgctggattttatgaggataaaaaattataagcaatcggcttgtctgcagggaaacatctgtgctataatttccagcgttaatggatatagtagaaaagttggaaatgatttaaaaagatgaagtccatggaggtttattttggtaaataggatttatgtgttttgatttctctttaaacctgtttttaaagctattttattgaatacgttttcttcctctccacctgaagcaacaaatagcaagattcttttagaggtccattcttaatacaactatttggatgcctggtatttgtagagtacatactgtatgttagatgtaaattgatttatttgggaaagaccaccacacaaagttattattttccttatgaactgccacttgtatatttaagtcatttgtttctctgagaagaatattctaaagtttatgtgactttgtattctaaatttcagaagaattaggagcttagtcctagaatcaagaaattctgcttctgctatttattagttatctggatatactttttattttataggggtgagattgcttgtagaatctctctctgctaacatcctgttactggactttttggcaagtcctttttgttgtcatattttttccttacacactttctttgaactcttcctccatctccttactctgtggaaatttatgtaacactactttccttagaaatccttccacttcaacattgttagtgttcttatattctttatatcttggaaggcaactcagcaacctcctggcccttcaccgctttctgtaggttgtttgcctgcaacccttgtgccgaaaatgcataaacagctctctctccctcttttttttttttttttttgccatcattcctcatttttctggacccattttctcattgtttgagaattttagtgtctggctcataatttacttttctgttttgctttctgccatccacaaagatgacttgtgacattcattgttgtgctgtccaaccattgcctgtgggctcctggatctaccctgtttgttgttgttgttgttgttgtgttttttttttgagacagtctcactctgctgcacaggctggagtgcagtggtgtgatcttggctcactgcggcccacacctcctgggttcaagtgattctcctgcctcagccacccaaatagctgggattacaggcatgtgccacgctgcctggctaatttttgtatttttagtaggggtggagtttcaccatgttggccaggctgatcttgaactcctgacctcaagtgatccacccacttcagcctcccaaattgctgggattacaggcatgagccaccacacccggctgatccttttttcttcccattctttgcctcccaatagcaactgtatatagacacatattcagcaatctatatggacacagtctagatctgcactgtccaatgtggtcgctattagagccactgtggcttttgagcacttgaaacatagtttctgcaaattgagatgttttgtaagtgtaaaacacaaaattaatttcaccagttttaagtttttctaatctggtgacctagaaaattttaaattacttacttgtgtggtttgtattgtattttttatatttttgttacgagcactggcctggacctggtctctactgatgtattagtccattttcagggtgctggtaaagatatacttgacactgggcaatttacaaaagaaagaggtttgttggacttgggctccacatggctggggaggcctcacaatcatggcagaaggcaagggagagcaagtcacatcttacatggatggcagcaggcaaaaagggagcttgtgtagggcaactcccatttctaaaaccatcagatcacgtgacacccattcactatcaagagaacagcacaggaaaagacctgcctccataattcagtcatctctcactgggttccccccataacacatgggaattatgggagcttacaagatgagatttgggtggagacacagagccaaaccatatcagctgagaactgctctgcctttgaattcttgaagtctaaaatttctccaaccagcccagtggctcatacctgtaattccagcactttgggaggttgaggcaggatgatcacttgaagcgaggagtttgaggccatcctgggcctcaaacatctggtccagcaaagcaagaccctgtctccacaaaaaatttttaaaaattagttgggcatggtgttttacacctgtagtctcagctacttgggaggctgaggtaggaggatcccctgagcccaggagttcatggctcactgcagcatgattgtgccactgtgctccagcctggcaacaaagtgagaccctgtctcaagaataaaaaataaaataataaataaataacatttttctgaccatagtctttgttcctttttcctatcccatgccagtcctgttatacctatttcacagcctacaaccttttaattctttaatccatttcttttctcaagatggcagcccctttctgccttcactttctcttatttacccttgatcctatcactaactactataactttatttttataaaaccactagttctctttgttttaaaaaaatcaaactaatggtttattttgtagtgatgaggtcttgctatgttgtgcaggcttgtctcaaactcctggcttcaagtgatccttctgccttggcctcccaaagtgttaggattacaggcgtgagccactgcacctggcccactagttcccttcccccccccgactcaatttctctttcttcccagttctcgtccctgaatctaactcagcaggtcttttcctctgttcttgctcccaggatggatggctctgctttggaaattccattacctgtgttcgtggagtctaattaaaactttatgattggggccaggcatggtggctcatgcctgtaattccagcactttgggaggctgaggcaggcggatcacgtgaggccaggagttcaagaccagcctagccaaagtggtgaaaccttgtctctactaaaaaatataaaacattagctgggtgtggttgtgtgcacctgtggtttcagctactcgggaggctgaggcatgagaatcgcttggacctagggggtggaggttgcagtgagccgggatcacgccactgtaccccagagcgagactttgtttgggccaggcgcattggctcaagccagtaattccagcactttgggaagctgaggctggagattcacttgcggcatccaggagtgagaggttacgatgagctgtgatcatgaactcccgcttgggcaacagcaagactgtatctcaaacaaaaaattaatgatttattaatacagctggtctaaactctatttaggtataatatagctacaacttagctgcttgataatctttttagtaatcactaattgactttcagtcatatcctgaactgtgcttacttcagtactaggttggtcaccaacagctcgacaggccatacactgtatatagcttgtgaagttatgtatcatgagtagctctgcttcaccttgtctaattctgctgcttactgtttgttgaaacacctgtgttttacaatttattatgacatgtttaagcttataaaagtatattgtaacgtgtttggtttgaaaggataatcataacacaaccaaccaccactcaccttaagtcgattatcaatatctttgaagccactctgtattcctcctttatctcagctgcctctttctccctagtggtaacaattatcctgagttttgtataagtagatatttgttttataatttcactggtgtctgcattttgaggtttacattttgaattagccatcatgtgtgaccttgggcaacttactttattatctctgaacctttctcttttttttcccaatttaaaaaattgtgttaaaatgcaaatagcacaaagtttaaaatcttaaccccatttttaagtgtacattttaagtatacattgataatatgcagtgatcacacgatccatctttataactcttttctttcatcttgtaaaactgaaagtctatacccattaaacaataacttccctttgacccctccctttgcaccctggcaacagccattctcctgtctgtctgtggctttggctattctttaactacatcatataactgttatcatacagtagttgtttgtgcctggcttatttcacttagcatattgtcctcaagttccatccattttgtaggatatgtcagaattccctttctttttaaggctaatgtttcactttatctatggtaccatattgtgcttatctattcatttgctgatgcatacttggttggctttcatgttttaccagttatgaataatagtgatatgaatgtggatgtacaaagaactcccttaagacctcgttttcatttatttagagtggatacttggaagtggaattgcagaactgtatggttattcctattttttgtgaaaatgccatactgttttccacaatggctgtacctattttacattcctaccaacagtgtgcaagagttccactttctccacatcttttacaacacttttccttttttttgagatggagtcttgctgtgttgcccaagttgaagtgcagtggggcgatctcggctcactgcaacctctgcctcctgagttcaagcgattctcctgcctcagcctcccaagtatctgggactacaggcccgtgccaccatgcccggctaattttttgtatttttagtagacacaggctttcactgggttagccaggatggtctcgaactcctgaccttgtgatctgcatgccttggcctaccaaagtgctgggattacaggcacgagccactgtgctgagcatggtggcacgcacctgtagtctcagctacttgggaagctgaggcaggagaatcacttgaacccgggaggtggaggttgcagggagctgagatcttgccactgcactccagcctgggcgacagagcgagactctgtctcaaaaaaaaaaaaaaaaattgtatgtgtgtatgtacacatatatatactagccatcttggtgtgaggaggtgatatataccaatatagtattgatttgtatttccttaggattagcatattttcatgggcttgttggccatttgtgtatgtctttttaatagaaatgtctattcgtgtcctttgcccatttctgaatctgattgtttgcttttttgtgattgagttttaggagttctatatattcaggatattaactttttttttttttttttttgagacagtgtctccctctgtcacgcaggctggagtgcagtggtgcgatctcagctcactgcaacctccgcctcctgggtttaaatgattatcgtgcctcagccacctgagtatctgggattgccattcctggctcatttttgtatttttagtagagacagggttttgccatgatggtcaggttggtctcgaactcctggcctcaagtgatttccccaccttggcctcccaaagtgctgggattacaaacaggccatggtgcccagcccaggatattaactttttaacaggtgtacagtttacaaatattttctcttcttctgtaggttgcctcttgactctcttggtgtaatatctttcgatgcacaaaaattttaaattgttaatatgcccaagttgtctacttttttttttttttgcttctgcctttggtattgtatctaagaagtcattgccaaatccagtgtttcagagcgttttctctctgatttcttctcagatttttttacttttagctcttacattttggtcttaatctattttgacttaatttttgtatttggtgttaagtgagggtctaacttcattcttttgcatatgtatatctaatttctcccagaaccatttgttgaaaatgtcctttccccattgaatggttttggtacccttttcaaaaatcgtttgaacatatatttgtgggtttatttctgggccattttttcccatttctaattacttttggtttatttttacaccagtactgcacttttcatttttgcagatttgtaattttgaaatctggaattgtgaggcctccagcttttttcttttcagctattgttttggctatccagacttccttgagaatacatatgaatatcaggatggggagtttttctgtttttgtagaacacaccattgggattttgatagagattgcattgaatctgtaagtcactttgggttgtattggtatattaacaatattaaatcttccagttcatgaacaggggataattttttgttattgggtttttaggttatctcatccactctcatggcaaggactgttggttatgtttgctgattcttagttcattctgggttgactctgctctcttcatgcctaattactctgtagacttttgtacctagagatctctttgacattaaaactctccataatataaatgaattcatcacttttttattcaaagcagagaaaacaactattgcagaagccttgagagaaaaaaaagttgatatatttgagagaataaaataaggccagtatggctggacagtaatggtatgtgaagtgaagtcaatgatagcctgggacccaatcattttgggttctgtaagcattcttcaccatctaatcctcaaaccttggagaagcagctttcttccccttatatttaggtgctcagaaaatcctgctgtttctataatatatgaattaactcccaaatctgccttttttttttctgtcgagatccactgctgttatcaggcccttatcactatgtacctgggctgtcggaatagatccctgtttgatatcttgacaccagtatcttcactaagagttcatattgttgtaatggctctcttttttaaacaaattggatgatatttctgccctgttcaacatctcctaggattaccttcatggcgaagtccttacttgacccgtctttttagtctggccctaatctaatcctctgatgtcacctcctctcactctacctcatgcacttctattctctggcattactgacgtgtttatggttcagcagacgtgccctagtttttcaggtctttgtgcttctgtttaaaatattccttgttttgcctacacatgatctcctctgctttttatggctgactgcaagctcaccatctatcactgttgatctgccacctttggaggctccctggaactcttctcccaggaagaattaatcacattctgctctgtacttcttgatatattattcatactccttacaccactttctttttttttttttaaatttatttttttattgataattattgggtgtttctcacagagggggatttggcagggtcatgggacaatagtggagggaaggtcagcagataaacaagtgaacaaaggtctctggttttcctaggcagaggaccctgcggccttctgcagtgtttgtgtccctgattacttgagattagggattggtgatgactcttaacgagcatgctgccttcaggcatctgtttaacaaagcacatcttgcaccgcccttaatccatttaaccctgagtggacacagcacatgtttcagagagcacagggttgggggtaaggtcacagatcaacaggatcccaagggagaagaatttttcttagtgcagaacaaaatgaaaagtctcccatgtctacttctttctacacagacacggcaaccatccgatttctcaatcttttccccacctttcccccctttctattccacaaagccgccattgtcatcctggcccattctcaatgagctgttgggcacacctcccagacggggtggctggctgggcagggggctgacccccccacctccctcacggtcggggcggctggccgggcagaggggctcttcacttcccagtaggggcggccgggcagaggcgcccctcacctcccggacggggcggctggccgggcggggggctgaacccccacctccctcccggatggggcggctggccgggcggggggctgacccccccccacctccctcccggacggggtgactgccgggcggagacgctcctcacttcccagatggggtggctgctgggcggagaggctcctcacttctcagacggggcagctgccgggcggagggtctcctcacttctcagacggggtggttgccaggcagagggtctcctcacttctcagactgggcggccgggcagagacgctcctcacctcccagatggggtcgtggccgggcagaggcgctcctcacatcccagatggggcggcggggcagaggcgctccccacatctcagacgatgggcggccgggcagagacgctcctcacttcgtagatgtgatggcggccgggaagaggcgctcctcacttcctagatgggatggcggccgggcggagacgctcctcactttccagactgggcagccaggcagaggggctcctcacatcccagacgatgggcggccaggcagagacactcctcacttcccagacggggtggcggctgggcagaggctgcaatctcggcactttgggaggccaaggcagacggctgggaggtgtaggttgtagcgagccgagatcacgccactgcactccagcctgggcaccattgagcactgagtgaacaagactccgtctgccatcccggcacctcgggaggccgaggctggcggatcactcgcggttaggggctggagactggcccggccaacacagcgaaaccctgtctccaccaaaaccagtcaggcatggcggcgcgtgcctgcaatcgcaggcactcggcaggctgaggcaggagaatcaggcagggaggttgcagtgagccgagatggcagcagtacagtccagctttggctccgcatgagagggagacgtggaaagagagggagaccgtggggagagggagagggagggggagggggggagggggaggggagggggagggagagggagagcccttacaccactttctatgtcatttttactgttgttaggtaaattgtaaatccctgtgcataggaatcgtgtctttttcaacttgatttccatgacttagaattgctactgcaaacaaaaaagaaaaactcacaaacttgttagattgctacatctgaagtcaagtatagtttgagagtttttttcattctaatgtgagtaaaagtttttgcgtgcctaatgtttttaactgagggtactactaattagcatcctcgaaggaaagaaaactgaaagtgattttgctttaaagcttgttattcatagtaaaagaacatttaccatgtaattcagggaagctttagaaagaaaacctaggggatctgttggccatatcaaaaaagtacaagctacatggacagtgaggtgatactgtaatacttccacctgtaggtcaactggagagacttggttttttccaaatagacctagcttaattgtgatgacgcatgccaacctaattaacctcctaatgttacttgtctttgtttttgtattgtcaggaacttggtgtgtgggttgggaatattagaacataatagaactatgtgatgtctaaattgagctttaacacaaactggttggtgttattgagggaaagtataacttattagtgggaatgggaaaagaagcctgatgttgtggtgaggtagaaatttccactgtgttactgtgaacaggaagtaaagggctaatggtcggtgactcagctgttttctgaacctgtctcatatgattcagtgtgcatgatgtctgtttattctcgacagagtaagtactacgggagtcacattacacaggcagacataatgtttatttaaccaactcagtgatgacctaaaaataacttgtggggtttttgtactacatttagcataatcagatagaaaaatcataatggacacccatcattgagtgctttcccttataaataactggatatatagtcagccagtactatttcatttcttacattgttaaggtgcaatctttggtatttaaatgaaaggtagcaaaagaagatagcctttaaattatccataaaataattctgtaccattttagattatactttggacagatatgcattttcggtgcttagtgccatcgttgaggtatttttgcaccaaaattttcatataggaacctttttgtgaggctatagcaaatgttgttttgaaatagaaatttacgtatttgctggattttatgttaatattaaattatagtagcaatagttttactttgattttcttgatttattcatcttgtactgaaggtttgtgcctaccatgtactgtaattgagtcttaaatatgtcagagccgggcacggtggttcatggctgtaatcccagcactttgggaggctgaggcaagtggatcacctgagttcaggagttcgagaccagcctgcccaacatggtgaaatcctgtctctactaaaaatacaaaaattagccaggcattgtgctgcgcgcctgtagtcccagctacttggaaggctgaggtaggagaatcgcttgaacccaggaggcagaggttgcagtgagccgagattgcacccctgcactccagcctggatgacagagcaagactctgtctccacataaagaaaaaaaaagaaagaaagaatcttaagtatgtcagagtatggttactgttatgctgtatacctgttacatgcttggctttgaaggagagagcacttggaagcctgagcttacataataatcataatctgctcattgtctgagaaattgtgagttgttatggtttattctttttgacatttgagtattcttgctctcagaggtgcagcatttgtagcatgtaaactttaatcagagattatttcaaaagggaaagggaagctagagtcactaagaagaaataggctgggcacagtggtttatgactataatcccagcactttggggggctgaggtgggcggatcacttgaggccaggagtttgagaccaatctggccaacatggcaaaacactgtgtctactaaaaattcaaaaattaactgggggtggtggtgcatacccatagtcccaggtattcgggaggctgaagtatgaggatggcttgaacctgagaggtgaaggttgccgtgaacaaaggtctcaccactgcactccagcctggctgatagagggagactctgtctcaaaattaaaataaatacataaataagaaataaatgccagcattctttttacaataatgctttatgtagtgggaatgtgtgatcaatctaatagtcagtagaactacccagtggttgatgctatatataaagtaggaaatacgtaccctttctataattgattttaaaagtttctgcattaagcttacactcttttatttcactccatgtttcagtaaaaatcacaggacttgtttttatttacaatattataccattgtttgaatatttaatgggatttatattttaaaatgttttagttggtatagttattagatattctgtattaacctagaatggaaaattaaagtatgtatcttctgattcactgcatgtaaataggacctgacttggacatcgtttgaaatgtattccagtaatcgcgctggctatacatggtcccatacctgcccttatcccaacagataaatggtattcttctttatttattcatttatttatttatttatttttgagacagggtctcactctgttgcccaggctggagtgcagtgacatgatcttggctcactgcaacctcctcctcctaggctgaagcagttcttccacctcagccttgcaagtagctcagaccacaggcatgcaccaccatgcctgggtaatttttaaattttttttgtagagacggagtcttgctgtgttacccaggctggtcttgaacttttaagctcaagcaatcttctcacctccgcctcccaaagtgctaagattacagatatgatcactgtgcctggccccgcaaattggtcatttctgatggttgtctgggcctcaaagcctgagttcagcatagtgttttggcacgttgcaaagaataagtaagaaaatgttgttaagtggacgcaactattccacatgggatgatgttagatttgaagaaggaaaaagtggttcctcaattcctttcagattggcagttgcaatagtaacagaaccctcattgacatgaagagccaatgttttcctgtagtagaggaattattttcttgttttatttaattatttatagtgtttcttgattatgttcatgggggcattttgttttgttttgttttgttttgagacggcgtcttgctctgttgccaggctggagtgcagtggtgcagtctcggctcactgcaagctctgcctcctgggttcaagcgattctcctgcctcagcctccctagttgctgggactacaggcatgtgccaccacgcccagctaattttttgtatttttagtagagacagggtttcaccatgttggtcaggatggtctcgatctcttgaccttgtgatccgtctgccttggcctcccatggcatgttgtttttaaataacttctcttgctctatgagatgagaaaatatgtattctgtttgggactttcttactctccctcgataataaaagataaaaatttttatttttcattcactgaaacataaaaaaggcatcatgttttgtgcagactattaaatgttgattttaagatctgtgttggatggttttatatagctgtctaccatttatgagtttcatgtggaatatactaccatatcaagttttcattgtttaaacagctctactttgtcaagtattgtttacaattcaacaagaaacaagcaagcatttacaaatatacgtgcaaatatgtattcgtctgacaaccaattagtgaaattgaataagtgctcttgaaacaaacttgtttgatatcaagcttttgtgctagagtaatattgttgttttgactactttaaaagtgtttttatctggatgtggtgactcgtgcctctagtcccagctacttgtgaggctgaggcaggggaagatcacttaaacccaggagttctaggctgcagtgagctatgattgtgccactgtactccaccctgggcaacagagtgagacctgttctcttaaaaaaactttttttcagttgtggtaaaatacacaaaatttaccatctttctgagatcatttgctataaaggaatacctaagtctggattatttgggggtaaaaaaaaaaaaagagctttattagtctcatggttctgtaggctatacaagaagcatattgccagaccaacacctgcttcagataagggcctcaggaagcttctactcatggcaaaaggtgagggggaggtgtgttcagagatcacatgatgagagaaccaggtgacaggctcttctaaataaccagttcttaagggaactaagtgagaactcactccagcaaggatggcagcaactcattcatgagagatcaactcccttaatccaaacacttcccattagactccagctccaacattgggggtcacatttcaatatgagatttggaggggtcagtattcaaccatagtaccaccttaatttttttttttttttaagagaaggagtctagctctgttgcccaggctggagtgcagtggcgtgatctcagctcactgcaacctccacctcctgggttcaagcgattctcctgcctcaacctcccgagtagctgggattacaggcatccaccaccatgccctgtatttttagtagagactgtgttggccaggctggtcttgaactactgaccttgtgatccgcccgcctcggcctcccaaagggctaggattacaagcatgagccactgtgcccggctcaccttaaccatttttaagtttatagttccgtggcattaagaacatttacatttgactgggcacattggcccatacctgtaatcccagtatttagggatgtcagtacaggggcattgattgagcccaggaatttgagaccagcctgggtgacatagcaagaatgtgtctctataaaagattttttttttttttaattactgggcatggtggcacatgcctgtagtcacaactacttgggaggcagaggtgggaggatcgcttgagcctgggagatcaaggctgtggtgagctatggttatgccactgcactccagcctgggtaacagagtgagaccttgtctcaaggaaaaaaaaatatgtaattgtcaacactgtgtatcttcatacctcttttcatcttgcaaaactgaaactttttgtccattaaatacagatctagtgtcccttatccagaatgcttgggaccagaagagttttggatttcagatttttctgaattttggagaattacattatttacaggttcagcattcctagtctgaaaatctcaagtgctccaatgagctttttaaatttttttgtttcatgccaactctcacaaatttacagattttggagcatttggattaaggacactaaacttctttttttttttttttttttttttttttgagacggagtcttgctctgtcatccaggctggagtgcagtggcacgatcttggctcactgcaagctccacctcctgggttcacgccattctcctgcctcagcctcccgagtagctggaactacaggtgcccgccaccacgcccagctaattttttgcatttttagtagagacggagttttgccatgttggccaggatggtctcgatctcttgacctcgtgatccacccacctcggcctcccaaagtgctgggattacaggcgtgagccactgcgcccggccaaggacactaaacttctaactccccattatctcctctccccatcccttgccaaccacaattttattttctttctctgtgatttgccatggtgtcggtacctcatagaagtggaatcaaacagtatttgttttcttgtgactggcttatttcatttagaataatgtcctcaaagctcatccatgttgtaatgtgtgagaactcgcttctttttaaaggatgaataatatttttttgtatgtatgtgccacattttgcttgtccattcatctgtcagtgaacacttgggctgctcctacctttttagctattgtgaataatgctgatatgaacatgggtgtggaaatatttattgttttgtttcgttttgttttgttttttaaatgagagtctcgctctgtcaccaggctggagtgcagtggcgtgatctcggctcactgcaacctccgcctcctgggttcaaatgattctcctgtctcaggcccccgagtagctaggactacaggtgcacaccaccatgcccagctaatttttatattttttagtagagatggagtttcaccgtattggtcaggctggtcttgaactcctgacctcaggtcttgaactcttgaccacctatctcgggctcccagagtgctgggattacaggcatgagccaccgtgcccgtccttttattgtttttttttaagacagggtctcatactgtcacccatgctggagtgcagtgacgcgatcatggctcactgtagccttgaccttcagcctctggagtagctgagactacaggagtacatcaccacacccaactaattatttatttttggtagagttgagtctcacagtgttgaccaagttggtctccaattcctgggctcaagtaatccttccacctccacctctcaaagtgttgggattacaggtatgagccaccacacctggccacaagtatcttttttaagagtctgcctcatttcctcccttactgccttttgttgtgcttagttgagtttttgtagtgacacattttgattctctttttgtttcattttatgtgtagtctacagaatttgtttgggatgattatcagagggatttcatgtaaaatcatgaagttataaatatgtattttaaggtgataataatttaacatcagttggttacaaaaaccgtacttcttttcacctcaggcctctccaactttgttattgatgtcacaaatcgcatctttatatagtgtgtgcccttagatttttatgcttttgtctgttaaaatcctgtaaaagaataaaaactggacttatgaaccaaaattttaataatagaggcttatatatttgtccatgtatttatctttgctggagaactttatattttcatacggtttttagttactgtctagttccctttcttctcaatttgaagaatctttggtcatttcttgtagggcatgtcttatggtaatgaactttctcagcttattaatttcattaatttaaaatttgggaatgtcttaattcttccctcatttttgaattaaaattttgctggatatagaattctcatgtgatagggttttttttttttttttctttcctttcagcatgttgaataatgtcattctactaccttctggtctgcaagtttctgctgataatcttattgaggatcccttgcttgtcatgattcagtttgatcttgctgctctcgaaattcttttccattgttttttaccttaaaaatttgttttttgtatagacaggttcttgctgtgttccccaggctgttcttgaactcctgtcttgatccctccaaagtggtgcaattacaagcatgagccactgtacctagcctgtcttttacttttgacattttgaatatgtgtttccatgtgggtctctttggttttttttcctatgtggggttcattgagtatcttgctatcatatatccatgtcttcaaatgtgggaagttttcccccattattttttttgaaataatctttctgttccttttcctctctcttcttctgtaatgtgaatattgatttgcttgatggtgtctcataagtcccttcggttctgttaccttttctttattctttttaatttttgcttctcagactggattatttcaaataacttttcattaagttcactaattctttgttctgttattagagactgcttttgtactcttctagtgaatttttcaattcagttattttttcagctccagaatttgtttcttttcttccccccctccttttttttttaaactatttctatctctttgttaatattctctatttatgtatcttttttctgatttcatttaggtctctcctcccccccaccacctttctttagcttattgagtgtatttaggacagtttaaaagtctttgtctagaggctgggcatggtggctcacgcctataatcccagcactttgggaggccaaggcaggcagatcacttgagatcaggagttcaagaccagcctggccaacatggcaaaaaccccgtctctactaaaaatactaaaactagccgggtgtggtagtgcatgcctcttatcccagctactagggaggctgggcaggagaattgcttgaacccaggggacagaggttgcagtgagccaagattgtgccactgcactccagccagggtgacagcataggactccataccaaaaaaaaaaaaaaaaaggtgtttgtctggagctgaaagccattatcctaactgaactaacacaggaactgaaaacgaaatactgcatcttgtcacttacaagtgggagctaaacactgagtacacatggatgcaaagaaaggaacaacagaccttggggcctacttgacgatggatggtgggaggagggtgagaatcaaaaaattgcctaccagatactgtgcttattacccaagtgacaaaatatctgtacacacgcaacccctgtgacacacaatttacctgtttaacaaagctgcacatgcactcctgaacctaaaataagagttaaaaagaaataaaaaccaaataccccaggaacttgtctttaacttttgaactgggccagacaaccacaatcacaacatccttgaaaacagctgaattatgccagcgcctccaccggtgataattctttcagaacaacaacaacttgttttgttttgagatggagtctcgctttgtcacccaggctggagtgcagtggcatgatctcggctcactgcagcctccacctcccaggttcaagcaattctcttgcctcagctcccaagtagctgggattataggcacccaccaccatgcccagctaatttttatatttgtagtagagacggagtttcaccatgtaggccaggctggtctcgaactcctgatctcaggtgatccacccacctcagcctcccaaagtgctgggattacaggcatgagctactgtgcccagcctatttctatactttatgatatttgttcaaagtcgagcacttaaatagccagctgttctaatctttgtggactgattccatgatgggtaacatcaggagtatcagcctggtgtgaaggcttaaggtcttgttgaccttttctgtgtttgtatattcactgggcctatgtgaacacttttccccagattcctgggatgtatcagtgcttttagctgccttgatctaagagtggcatgttagatgttctgttgtgttcctctgccctttgtcttttgtccctctagcactggcagatcggtgacatccctgtagctctcaactaagccactcttcccatccgaactttgcatcaggtgaaacagtaatcagtcccatgagcagcacccccagacaagccagaacgatgcaaacaagttccactcttttccttctgtcatgatggagcatcttagaattaggtggattcctcccaacttggcctcaatgaggagggattggagcaagggcaacctctaaatatacatacatatatacattaaaaaaattttttctgtggctgccttacaaattattgttctttattttaatattttaaaaaatttcctatattgttttgagtgtggctttttctcgatggggcatttagttggctgccgcagattcttaactgcttgagagagtttgcgtctggttgaaattattacacagttgagttggcagcttctttcacactgtgatccctcccagattctgccggcttccttccctgagggcccctctgagatatagtcagggatagcttccctggactctagctggagaatgtgagtgcttacaaagctcttcttgctactgcttctactttcatattccgcactaaatctgctttagttctaggtaaggttaaatccttctcctgtaatctggattttcagttttttcagtgggaatgtgtgttcggaggcgggttttcctgcttttacacttggggaactcacggtttctcacctgtcttgtggaatttacagcggcgtgccacttcttttagaggatctgtggattctttctgttttcccgatatgttcctatggtggttcttggcacaaaagtccatggtgtgaatctccacatgttgttctgtccatccaagtgggagctgcacgttaatcctgtctcctatccgccatcttcctccctactttttgttggtctggacagggagcttgtttgttcagtcacaaaagtttattctttgtgaatcctattggcttctgttctccagttctccaggttcttaccggtttcttgagtttttacaaaggtactttggtcggtatgttgttcacttggtgttttcattgggtgatgtggacctggatcatcgtagtctgttatcttggtgatgtcctgtgtttttgaagcagatacacatgtttttgaagcaaaaagtgtcctgctttatgaagcagatatgcatcaatagaatttttgctacttctcttatttcaagcattttattgcagtgggatttgaaatgtgcactaattatacagacttggggaaaaaatttctcatgaggttgcaggtgcctctaagcaatgtgaatggaaaaccattttagggtcacaataaaataatgtgccatacctgtggaaatatggaatagtaaacgactgtcccgaaacccttaggaatgagaatgttggatttttttttaagacaaaaacttaaggatggataatgtaaatgtttaataattaaatagcaagaggtaaaggaggaaaacttttagttctaatatcaatataggccagtgttctcaaacttttatacttcaggatccctttatactcttaaatagaactctttgggcttctcaatcctatgtgcattgtatctactaataaaaatgtctgccacatacccatgtgtataagcatagtttatccttctttcaagtaaaatggcattgcaagaaaaagtggctagttcagtttataactctaatggtgttacaagtgcttttccttagtactactaatttacctctgaactgttttatgtcttctcacttgatcaatacagtatactaaaaagacatgctaaattttgttagtttactgttttatttatataacattctttaaatgaccaaattatagagatggaggataaatttgtggttgtcaagggagaggagtgaggcaagaaggaagatatttgtggctattaatagggtaggtagggtagggtaataccacagatccttgtcaaggaatattttgtattttgactgtaatggtggttatatgaatttatacatgtgataaaattgcatagaactaaatatacacacagatgtgcatgcatctgtagtgaaactcaggaaatctgaataaggttgatggattgtatcgatgtggtttttctggctgttgtactgtactgtagttagatattaccattagggaaactagatgaagagtatatgggagctctgttttatttctcaaattccgtgtaaatctataattatttcaacttaaaaagtgatacattctgttacagaagtgacattcttttgtcaattacctgtagaataagaaaaattgaaaagttaaataaagaagtgacattcttaagaactggcttttttttttctttcctttttttttttttaaaaaaaagtttaatttgtcgtgaaggcttagggatgaagaatacaatgactatcattgccttggttttcactaagtatatgtaagatttacttagtgaaatctcagatttcctgagtatatatttaagatttactagtagctacatccaccttgcttttctatcattgttgaaaatatcagcacaggcctgtgacatcttagtatttattttacgaaaatatttcacctcccacacctgctttaatagcattacagagatgcccaggactctgtggaccacactgtgataatcagtagcttaaagcttcagtctttattagctgaggaaaacaagtgctatgcttaagactgtgtaggaaattcagtgataggtctctgtcactgtctccagcgttttatattgtggtcttgtttgttggatattattgtacttctatgaaagtagagttgcagaagtttagagtgatataaaatatagaactcataaaagcaaaacatgggaattaacagtttgctatacctgtgttgtgcagtatgttagccatgggctatgtatgtggctatttacattctaaggattaaaatgtatataaatacaatttaaatggaaatcagtggttatagagtttgttttttgcaagaagaaaaagttctagacatctgttgtactatgtgcatatagttaacagtactgtatacttagtggttaagatagtaaattttgttacatgttttcttttttcttttctttttctttctttttctttttcttttttttttttttttttgagacagagtcttgctctgtcacccagactggagtgcagtggcactatctcagcttactgcaaccttcgcctcctgggttcaactgattcttctgcctcagcctcccgagtagcagggactatgggcgcaagccaccatgcctggctaatttttgtatattggccaggctggtctcgaactcctagacctcgtgatccgcctgccttaactttccaaagtgctgggattacaggtgtgagccatcgtgccaggccttgttacatgttttctaccacaaaatttaaattgaataaaattcatttaaataaacatttattttttcagtttcatcagtcacatttcaagtgttcagtagccacatgtggctaatagctaccattttagagagagtaaatatggaacatttataattatcccagaaagttctatttgcattggttgtgtagcacttaagaagacagttttcagctgggtggggtggctcacgtctgtaatcccagcactttgggaggccgaggcgggcagatcacaaggtcaggagtttgagaccagccttgccaatatggtgaaaccccgtctctactaaaaatagaaaaattagcagggtgtggtggcacgcacctgtagtcccagctacttgggaggctgaggcagaagaatcccttgaacccgggaggtggaggttgcagtgagccgagatcgtgccactgcactccagcctgggcgacagagcaaaactccgtccccccactacccccccagcaccccccaaaaaaagaagaagaagacagttctcaagaggttgaaggtacttggtctggactttaaggtgctatttttgtttctctggccagatttaagtgtcaaacatttgttaggtgaacgagtttctctcaattaatttgtaccctataatatctactaatgagaatgaacggggctggatgtggtggctcacccctataatcccaacactttgggaggctgaggcaggaggattgctagaagccaggaatttgagaccagactgggcaacattggcaagaccctatctccacgaaaaattcaaaaattagtcaggcattgtggtatgtgcctatagtcctagctacttggaggctgaggcaggaagatggcttaagcccaagaggctgaggctgcagtgagctgtgttggtagcactgcactttagcgtaggtgacagagcgagaccctgtctccaaggaaaaaagaagaaaaatgaataaacacacttatatatgcataaagagaagtttataaagagaaattttaaagcaaaattaagaacttgtataaattaataggaatagcctattttaaaacttattggtatagctatgtagtcttattcagattttaagattttaagtctttaccagctctaagatgatagagatagatttgcatctagcccctttacaatttcaaattttacattccaacattgtaatcaatctggaatttcttttggtataatgagttgaggatggttaaccacctttcttctaaatgattatttagttttctcaacacaatttattaattttggtatttttctattaatttgaaatgtttctaatacattctgcatatatgtgggattatttcagcattctctgtattactcattccatgtcattaaatgttcttctgtatcttttttaatgactgcaaaggattatacactgtggctgagtaagtgcttcttacatctatatctctttattgatttaataataaatttcttaaagattaagtagccagggcgcagtggctcacgcctataatcccagcactttgggaggctgagcccggtggatcacctgaggtcaggagtttgagaccagcctgaccaacatgatgaaaccccatctgtactaaaaatataaaaaaattagccgggcgtggtggcatgcatctgtaatcccagctactcgggaggctgaggcaggagaattgcttggacccaggagggggaggttgcagtgagccaagattatgccattgcactccagtctgggtgacagagtgagactccgtctcaaagaagaaaaaaaaaaagattaaaataagtgaaacagtcatctatcttaggccttatttacgcacatagcccacagcacagtgttttctttgtgctagatttctgctaatgctgttgatttaatttttattatcaaaaattatttagaactctataaaatagcagacttcctactggatattctggtttgctttgtattttgtttgtttgtttgagacaggttctcactctgtcgcccaggctgaagtacagtggcacaattacagctcactacagcctggggtcaagtgatcctccagtcttggcctcccaaagtgggattacaggcatgagccactgcacccagcttgcttggcatatttgtatttcatgcaggagaagctggaggacagaggttttctttattaaatttttattataaaataatcctactgaacattggaaagtaaaaacataatacagaagtatataaaataaaacctataagttgtatcctgtacactctttataaccgtctctgaagtagtcaatttaaaatttgctacatattttcttaagacatttatcttccttggttgttgtgtgtactatgtgcatatatatagtttttaaagttaagacagagtctttttatacttaaaaattctacaatttgcttttgtcacttaatattattatggacatctttccatgatgtatgttgacttgattcattctaaagattattctaaattctctcagtgactaagtacataatctcaccttttttatatatagacatttagaatatttccagtttttttgtttttgagtgtgttttttttttttttttttttttaaggaggggcccattgtgaatatattcacatagtgagctccctgaagtggaatcatagaatcaaagggataagcatgtttaaaatgtggtcagtattaccttacagttttttgttttgagatgaagtttcgcttttatcatctaggttggattgcagtggtgcgatcttgtttcactgcaacctctgcctcccgagttcaagcaattctcctgcctcagcctcccaagtagctgggattacaggtgcccaccaccacacccatctaatttttgtatttttagtagagacgaggtttcaccatgttggccaggctggtctcgagctcctgacctcaggtgatctgcctgtctctatctcccaaagtgctgggattacaggcgtgagccaccacacctggtaccttatacctctttgaaaatttggcagcttagttttttagtcagatttatgtttgttcacatacagtgtgtacaatattgagtttaatctttatggctgaatttagtttaggtgatggcagaatcttaaaacgagaaatggcatttcatctctgacttatatgtaaagtacttagaatagtacctgaaacctagtaaaagctgtataaatgttttatgttataattatttttgttagcttatgtccattgtactacattgtgaaaataggaaatacagattaattttttcacatgtctatggtttgaaaaccatcacatctggagtcttgttatacttgatatgctgtgtttgttttgtcttataatggaattcaccatttctgcctgtggttgactgtccaaatcactgtttttaacatcatcattagagatttaagggttatatgtacaccataaggactgttctcattggcttttcttcagtaacattattaatttacatcatttgcttggtttgctgtcactattgtgttcttatctccccaacaaataaaaagcattcaaaaaggtttattgaaacataaaattaataatgaaagtgagaacagatgtctgtaactcatcaacttggacagtatactggattgcagagtaaattctgtatgttcacccatatgtccttgaagaagtaaatatttgggatgactttgaaattattcgaaaagggaaagtacaaacagatgctctgattattattgaaatgatccttcattgatctgtccctagttttctgtgcatttgacatgaaacatggtcaaagtatgttcccactgaaattttgcattgtttttcaacaaagcatggtagtaaattaaggaaattattctagaataagtcattaaatgcagagaagagatcaaaagagtagaggcatcttttacagttgcactgcttacagcaatgataggtaacaagtcatactgttcctaagaagtttctaaaggcatccacagagaatggaaaaatgctctgaacgatcgttgaatgatctattggcaaaatttctttgtcatgtgccaccgttaagcattccatattgctagtggtataatggcatacattgtgacagaacaattacttgcatatgtggctgcattagagattgtgctttccatttgatgaaagtacttgtgtacagagtctgaattagctcttggcatatgtgcaatgtaaatataaaaagaagtactagatttttattttttaagtctgtttagagtagaaagcctatatagaaaataattctttgttttttttagtaatcactttcagagcaatgatataatctggaaaaaggcacattgggaacattgttgacagagccccagcaatatctgtgatcaggaagggtgttctttctgaacaaaagaactttatctttgaatgccaattcacatattgcattttcagttggctctatgttcccttatttggcttgagtgttgaaaatgttgttaaaattttgagtgaagtcaaataaggttgtcatgtatatttttagcatcttcaatgaaatacagtggattccctttctatttcaatagtacgacagctatgagagaacaaagtgttcctctaattgaagtatagaaagaggtaacatttctttatgtttttgtaagtgatatatttcagtgttatatttagtatcttgacagctagaaactcctgcttcagaataccaccaaattaaatgtgaatagtgtcaaaatatatcctaagatcaaagagcctcattactgagaaatgaccttatgaatacttgatttttttaaatttaatgaagaattaaattggtgctctcttttaaaactatattcagattctcaaatagaagttgaagaaatactttccctatctcagtggagccagaattaataagaaattcattccctgtgttttcttaagttaaaatagtcaaactttcagcctttcagatttcggatgtgatacatacacataaacgttgtgtctgaaacagtgctgaaactaatccatgataagaaaactttatttttagatcctgtttgacccatttattaattatttgatagacatgagatactttgctgccatatttttaggttagtggctagatttagtagaactagagtaggaaaggaaatcaatctgatgttgaaccttagtgtcagctacagagatggctatattaagattaccacgttgaaagattgccggatagcctctgtgtctaatatgaagccattaattttgttttttataactcattaaaaaaaagaaaaagaaattttgttttgttatttggaacgtatgatgaatcctgtcaagtatttcctttaaaattggtgatcccagctaaacgttaaatggtcaacagatgctaatactttctagatatattatttactttgttatcttaggtaagatacttaaatttttcagtccttggtttcctcattcatagacgtgggatagtgataaataaaggtgatttgggaatattttatctcatttaatcttcacaaactgccttgagaggtaggtgtgttgttcctttttacattcgtgggaaagataaatgagttgcccaaactaacaacagtgttcagtagcaattgttaggatttcagtccaagtcttgtggatatgtccattgttcttggtggcatttcattttaaatacgttacaagcaatttttttattcagtagcacacagtatattagtctataacatttggcatggatttacaatgaaaagcttatgtttttatcttcagaaaatatatggtaaatgagccgtgtgtattacattatcacttattctaaggttttatataaggttcttattggttattgatttttatgggatcatgtaaaaggattaaggtatgtaagctttggcaagattacagcaatatataacagttaactgtgtggactgctaattgtggctctgagatgtcttcctcaaggaaagcacaccgtagcaatagcaagttttctcatccatgtttgattttgtttgtggtttgggctatccatttcagaactagatgaattcacagtaggtcctcttagcattgataatttcaaataattgtacctagtctttccttcatctttttgtgctgccataatcgtgtatatgaatgttctggttgatgctctcaggagcgtcagcaatactgaatagagaggtaaccaccagagtcttactaggtcatgctttcctgtttctaaccatgatgatgaggcatgataaggcaatttacattggcaaatttgaaatcattgatgatcagagagcagggaaaattgttgtgaacctcacaggcaggttaaacaagtgtggagtgatcagcctgagatatgatgtgcaactcaaagatctagaaaaaaaatggcagaataatctgctctcatcctgtcagttttgtttcattgtactgacaaccttagctggcatcatggaccttgaagaggcaaggtgaaacacataggagggaaagttctgggattctttttctagcaacataatacatacttgtaaataaaatgccttaatgcacaaaaaaggaaaaatggttacacctagattttggattgctaatgtccttttatcaggagatttatggtaacttaaaaagtgttgcattagctggtaaagaagctcttgcctgtagtcccagctactcaagaggatgaggcgagaggatctctttgagcccaggagtttgagaccagcttgggcaaatatcaagactctgtctcttaaaaaaaattaaaaagttgttcaggtgctttgggaagccaaggcaggagtattgcttgaggcctggagtttgagcccagcctgggcaacaaagtgagaccctgtctctgaaaaaaaaaaaaaaaaaagaaaaaaattagtccggcacagtgctgcgtgccggtagtcccagctactccagaggctgaggtgggaggatccacttaaaaccatgagtttgaggctgcagtgagccgtgattgtgccactgcactctagcccgggtgacagagcaagaccccagttcattaatttaaaaaaaaaaaaaaagaaagaaaaggaactgtactgattttgagttactggatattgtaataaagttaaatttttaaaaagtagaatataaaccacattaataaccacttctgtaaacttttataaaacatcttgaactagaattgccatgccatattttttcaaaatattatattgttcttgccattttttgacagaccccttatccctctggacagaatgcaggtccaaccacgctggtataccctcaaacccctcagacaatgaattcacaacctcaaacccgttctccggtaagtaagcagaagcttgaaccaaattacattctctacctgtgtttgtgtgtgtagtggcttgggtttctttggcaaatatttttactggattttggaagtttgttccaaagatgatttattattatgactcctactattatttgttagctttgtattttcagaccttacctatagcaataattaaatttattgagaaaaagaagaggtggagcttttaaccctccactcccttttaatacttttctatagcatgatttttaagtctggttgcattcaagtttactttatttcagcttataatttttgttagttgtactgttcaaaattcaggtaagagtaaaatacaatgattttaggagtaaattgaatttcactaattaaattctcaaattccagtggttttgggaagcaggacttttgaatcagtgttattagatctgttctaaccatttaacagtgtgggtatatgcatgacatataccagtgagtgtattcatttattcaaatgagaaataaattgtgatacaaatgtaaatgctatcatcctctttgttcatcctttacatgaattgcaataagtactgccaagactgagaatttacacaaggttcatcctttgtttcacaaaagtatacagtggcttcagctctccattccttagaacatcgtttcctgccctgcatgattagctttggctagaaggtgcttctgtaacatctcacattgtgtatctcacatccctctttgtacctcagctctgtgtattcttcagaattcagggatatctttttgttccctgcccctgcctttttgcctggagtgcaggaatacctcattgcattagctcctattcatttcattttatgcatgaacttacaattgtttaaatataccaaagacttacttaaagaactaggagagcatagactgcaccaaaatgtaatctctttcttatcctttttctattttccttttccctgttgccctgttctccaatacctgttcttagatcctggttctccccagtgggtggaggaaccattctaaagaggtgggactttggtcctagttgcctgtttgcttgtctctttttttgctgaaatggtcaataagatgtctgatacaagttttgttatgagagtggtttggggatgtgtacacttgacttacttgggcctgagatctcaccagatcaatttagataggccctggttctaataattaaacatggaacattatggtaagctcctattgcaaagaattctttggccctctttctgtatacccccaaccctaatttctgattatcaaaaaagaaaatgaattaaatttacatggttagaactggcgcagaacctgactgaagagctgcatctctaaaccagtttttttgacagcccagcagaacagtgccaatacattgcacagacaactggaagaggaggaaggttttggaacagactcccgtttacaggtccttggctggaagaggctggataaaatactgcattgtaagcaatataacaaactgtacttcttgcaggcagtggtgcctctggcacttagtatttttgaccacatccatttattggctgatgaacagaaatgcattgattgcttcctctctgaaagtctaacctagcatggcagtttctgccaggcatagtggggaaaagaataacaaattgggtgggtgttctctattgggaattagtcaggaagaatttgggggtttagatttttctttattttaaacttgaagtgagatatccctttcagataaatttgaatttaaaagataaatttcgaggcttctttttactccctttcaattttataattgaatattaaggaggaaattgtctgtagttgtcagccatttttctgtggtcataaactcttcagatactatcctctatacaatttttgccatctgctctgctagtgaccattacccaccccattactaaaaatcacacacataacattccattacataccctaaaacaagtgcaagactagcagaccccagactactcttgcttcttgttttaggtttgattttctttattttgttatggggtttttttttgtttttgttttttgttttttttttgtgctgggagggtgaagttggggtctgaaatttggcaggattgcattttctgtttacgtcccaagttgtcatagtctagtctcatccatctcacagctgtcccatctggtgaggagaggtaagctgttacattgaggcagggcctcttcctgtggctttgtagagcagctaaagcttactccattctatttctgcattaataggccattggcaattgcgcagttttaggcttttctgttcttccctggacagctgcctttgcaatccaactggcttcaagtggcctctgtccttccttcaggttatctttgtgcctgtctttctacttgatgcttagaatcttagttaaattcatactgtggaaagaaaatcttttttaaaaataataacaacactgataagctatctgttccattttctcgttttactggaacttttaaacagcagtagttgttttttttttttaatagcctgtctaaagtagtgaagctattaaatacttaatttggagagggagacagtttggcttttgtagtaacgtaaccattgattatttttatattttgtggtgttaagtttcaaaattacatcaatgttatgttggccatgctcagttaccaactgtgcccagaaggggtgagtaagtgggtgggtggcattaacactggatccaagttcacagaaggctgctttcctttatatcaacagtcctcaccatcttaaagacccttctttaacaaaaagaaaagaaaaaagaaagaaaaatttctagttttaatatgagccagcagcgactacagtttgttctgttgcttacagctacccataggattaagactattgtcatttcaaatgaaaaactcaatagccaatggtgactagtgcaaaatagactagggtactttcctagggcactttcctactaacttaagttggggttttctttttcgcttttgtttttatatatatgtaattttataagatactcttcttgttcatagaaaattctcttttgactggaacattcaaaatgtacaaagttttagcttttattttagagccttgaaaatgggacattttctgtggaacagtgataagacaggtactgccatactcaggttaattttgtaacatggcccctctcttccattttcttcaaaagtgtcataaagaaacatttcactccactccctactttcataccacatgggtggtattgcctgttcttgtccatagtagaagtatgatgttttcttctcctaattggaaaactgaaaatacaagacctcaatttctttgaagagaaaattttctgcaagaactgtaactgccagttatcatcattctgaaaaactatattatattgattagccaagtatgatggctgacctaacataacccaagcttgtaggtcattaatgcacttttcattacttgaacaaaaggtgacattttagcttctgaggtgaattcttgacagagctgttttcagctgtctcctacattgtggccatgtgttctactgtaatttgttgaaattttaaaatgtgaactaatggtagttggggaagtaattccaaatgttttgcaaatcactattgcacataacttaaatgctgagcatgagagattgtttcttaatcttcaatctaattcatctgtagtgttaagctgacagaaggaagtctctatagaggaaataagagagccaaagacatatatttttgctccttaaatatattagataaaaaccctgtatatggtttacattaaacactgctttctaaatattttcttttactattaaagggagtggttaacattacaatagctaacgtattagtatccacaatatggctctacataccccggttaatattacaatagttaatgtattagtatccagaatatggctctacataccccaatatttttgtctgttcctttcagttaaaatgtattcaaacccaaatttggcctggtgaattgtttgatcctagaggtttagcagttaaaatttgcataggtgaaaaaactttttattttcttctgagttagtagaagagttggaatatatattagccactttcaagtactctatgatttagctgaggaattacatttctttgtgctttattcttaggtaacaataggtacatatacacagtgctttgctgttgtctatagtaattaagagatttgacttatttactcttttttcttatcaagcctataagaataccacttggattaatcatgttagagactgatgttctttactagctgtttgccttgacatgccttgtattaaattatattagttaaccgcatttaaacttaaacttgtgtgtgtgtgtgtgtgtgtgtgtgtgtgtgtgtgtaaagtcataaaagatttttctttaactccaagaaattaagatactgaaacttccatttcatggataagatatcccatttaacttaagaaaatttgcagttaattgtgttacgttttttacttcctgctggactttataattatctcctggctaggtcttgtaatgtaaaagctttctcatttcctccagctgtatcagttacatacagcatacttgattttcatgtttgtcttaatataaccacttaatttttcaaacttgcttttgccttattttagggtttttttttttttttaaataatcctatcagagagtaccttacatgcctaacagcatagcctgtttctctcccagttgataaatgacaaactattctgatagtgctgttaacctgttgaatcttagtacctgtctgtcactgtcctgcagcaaagctttgactgttttgtgtgttgttttttatttccccactgtgggttttttttcttttggcatattgtgtgaaattttggtttttgttgtggtgtttctgactctttgtgcctttccttttgtgtttgttttccctccttttctcagtttgcagcggggcctcgacctccccatcatcaggtactgtacccttgccccttcactatcacccttaactaatagatgggggctttagtagctgctgactcttagaatgctgccatcccatagaactactcaaattactcatttcaagagtagcttttatctgatataattcagctttctttgtccttcattaatctcactgcattttgttattaacaaatccatttgcctctgtttatggcacatttaaaaaatgctacagttttttttttcttgccaagcattgtttttaaattttacaattttgaaaaatttagatactaagtgtttatagattttgtggatatttgtagtaagttaaatttaactgaatgaagcaggcagcattctatgggttttctgttaacattccgatataacctgtattgatgtgtataaaatagcattagtatttctaaaaccacttaaactcagttactaacttagatctagtaataaattgattaaaaatcatgtacatccatttgctggatagaattatttttattattagaacacatagaaaatagatatcttaattaatttaaataactttatcctattggttttttaaatgaaataattttaattttttaaatgaaataatattaattctatcctattggtttcatacttctatcctattggaatctatttagaggtggcaagacagaaggacttgcagggttctccctccaaccccccagtagctttttatggggtattctgaaacattttcttctgctgaaagagctttggtttagtctgttcatattacaagctttactatgtaaccagctggttaggcaagtctttttctgcatctttgtttcctcatatgtaaaatggagataaataacctctgccttagaaatagtgtaagcatctgacacaaaacaagcagtcagtaagtggtaactgtctttaatatgattgttatggaacaaagtctggttggataaagtaaatgttaccagtatttgcctgtgttatcatatttacaattcttattactgagtaaatggatattgtttagttgaaggcttccagtgatttaatacctgactctgtttttcaaaatgtattccttccaatctggaggatgtaaaggcaaagcaaatctgagttattaaaggtactttgcaggaggatggctatatggggtggatggctattgtttgggtttcatagtgaaataaaacctcagggtattttttttaattcagagataatattgtaaagtattaatactttaagagcttggacttcgccatcagctagatctaggtttgattcttccatgttaaccaagtgttcttggataaatcatttactgctctccaccttagttttctcacctgtaaaacggagacagtaataccatgttgaaactattatgaaaagtaaattagataatgaaaataaaatgattagcggggtgtttggcacatagtaactaggacatagaattagtattactactactaataataaaaatattagtttcttatgtaaaagagtgtttataattgaaaatttagtccagtgccatagaagcatggcttaaattttaatccagggacaaggcaaatactcctaaaagagagagacgttggggatctttactcaagaagcagagtgaaaagaaactatttatttgagaaataactgcaaaggaattagggcaaaaacgttttctgatctcctttatgtaaggcacctgttaatttctttgttcacatgcttgtgtttttcaaaccttggtttattttcataagtcatttcagataagctagcctaaggtaaactgttagtagagggaattaacgttaccattgaccacaattattttggtggattttatacactgtagattgatggaatgatgagtgaattttgaaacaaaaacagtattgctgaataggccaggtacggttgctcaaacctgtaatcccaacactttgggaggctgaggtgggtggatcacttgaggtcacgagttcaagaccagcctggccaacatggtgaaattccgtctctactaaaaatgcaaaaagtagccgggcgtggtggtgggcacctgtaatcccagttacttgggaggctgaggcaagcgatcacttgaaccctggaggcagagtttgcagtgagccaagatcacaccactgcactccagcctgggcgacagagcaagactcccatctcaaaacacaaaaacaaacaaaaagaaccatgttactaaatagcctgggcctttcttattaagactagtaactcttttaaagactgttgatcaaaaaatttaagttcttaatgaaaatagaagaaactttaaggttatgtttctgctacttgggttcgataatagtggttctaaaattaggatattgtatttaagcatttgtagtgagctttgggaaattctgttctctaagaaaacttttatgagctttaaagttatgtggtacattttgtctttctttaattccaacaatcggggaaaatgttcagaaatctctgtgagaaaaggttgatttcagcccacattttcatgtgcagtaggactcagtaaagtgttagcagattagtcgtttaactgtatgatactgctcatgaatttatggctagttttgattattttaaaaatagaagtataagctggatgcggtgtttgatgcctgcaatcccagcaatttgggaggctgaggcaggtggatcgcttgagccccagagttagagatcagcctgagcaacatggcgaaacctcatctctgcaaaataaaaataaaaatacaaaaattagttgggtgtggttgtgcatgcctgtagtcccagctactctgggaggctgaggtaggagaatcacctgagcccaggtggtcaaagttgcagtgaggtgtgattgtgccactgtactcagcctgggtgaaagagtgagactttatctcaaaaaaaaaaaaaaaaaagtatatatgtttattatatttattatttatttcttaccaagaaacataattatcatctaacaatagttcttggaggtaagttcctaagatacagtataaattcagagcaatgatttttaattcagaaaattcaggtagctggcacttttttctttgttatcctttttttcctgaacaccagttaaattcttttcatcatatcacagagaattgaataaggatgtctgtacccttgcctcaggcagcaacagtaattaccttgaatagaggagaagaaagacatggggttggagtggcatagctgagcagggctaactgaaccggcattatgtgtggtataggataaattgttagaaagagtttgctattttgcatccacaggagatgtggggtcaatttggtttgtttcactatgggataggtattggcatttgggtgggataaccagttatcaaagctgccgtatataatacaattaatttagcatcgtttgggctttaaatgccagtagaatttccctagtgacaattagaaaacaaagcaaaacaaaagaaaaccaccactgtacatttccaaataccctccatggaaatgacagcatttcccatttgagaatcgcttactgaatctgtatttcacagtatcttctcttcagatctaaagtcaggtagcacctaaaccctgaaagatttacagaggagttgctcataatacagaacaagacatagagacttgcataatgaaatgaaagctgttggaggaaacaaacattgagtggtatacagagaatatacttttaaagggaagacactcatgtcctgggatattttgggttttacatacttaagacttaaagtggaattgaaggcagaaatggttttttcatcggtggtagtttgctttggccagtgaatagatttcttttttgtcctttattgcattattcatcagtggctgcctttctgatcactttacgtcctttcatgctttgatctcaatttattttttgaaggaatttgttgttggatgatgtttttaatgattgttgtttctaaagtccaatagcaaatatagtaactttttgttgatgcttagtaaaaattgcaaagtatgttctatagctgttgcaaagaaaaaatacaattatttaggtaggctttttggaattaattgcttgtgaaaagaaaacatcatccagtttagtaatcttagaacttaaatattttttctgtgtaagatggagttacttgaattcaagtaaacaaaaaataacaagattttaaatggtaaacattttctttgttcttaatggaatcaagaaactgctttgagtgtattccttggaacttcttttatttaaaaggtcttttaactctgtttggagggctagagctctttttgagtccccacaaatcaagtgcgccatgctccagttaggattatttcagccacatcttcttcctgatattactattagtttttgtcttttgtggagattcttcagattaataaggatgtgctattcttttggcattttataacctgaagagcttttagaattacagttttcttcaaagataaaacaagaaatactaagtcattttatatgcaaaacactcttggctttagaaatatgtcaactatttttgcactgatgcttgaaaatcccaaggtaattagaaactgaaagaacagaaagtacactcagaattatagcaagccacttggtataatttggattctggcctgtgttgtttattttgtgtatttggtcattaaaatctgtgtagttctggtttaaagttacttatgttcctgtccttattttactttggggtttcacaatagagatcaagtgttggttatatactatgactaagtagtcttttcattatgagaaagaccagggaaatagtattttaaagtgttcataggacaaaacactgtgcagttttttgatatatgattttggttcacatacttttcacaaatgctgaaaaatatgctgtattcaaagcagtgggatttagtgtaaacaaataatgagcttcataaaaccagcgtacactatcagcaggaggaggaggaggaggagtatgtgccataaagaaatgtcttacttggtggcaagcgttgaaattgtgcatgttttcctcttgtggtttggttctttttgtgaaaaagaaacttttgaaaagaactgctgatttatgtagatttctttttcattatgatccctaaaggtttctttactgaaagtttgtgatgttatatattcctagttgagatatatttgtgttactataggcaatttattagatttggaaagtaaaataaatgggccagacctggcacaacagagttaaatggatatgaatagcaagccatctcaagcatctatacgaccttatgacatcttaaattatgatcttatgaactttttgttttttggagcttggtacaagtgagtgatgggtggttttatctggtatctcattcacaaggagttgtatagtagcagcataaataatgaagaaaatatatgttgggagtcagtaaaactgggattcaatttcagcttcactacaaattatctttgggcctcaagtttctgatcttcaaaatgggtaaaatatgctaataaatgatataatactgagatgttttaataactgcatatatttcctatgggtgtggtgaggataaagtacctgcctatcacagtgtctgaaatgaaataagtccttggtaggtgtcagtttcctttagcagtgagactacctgcctttccccttttcccaagctattttttagcatgagtgaagtattttataaggatgctcatttccaagactctcccttatgatctgacagaacacctcctgttcctgacataaacctctagggtagcactgtgtaatagaatttctgtgatgatgaaaatgttctgtacttgtgcttttcactgctgtagctctactagctatatacatggctatagagcactttaaatgtggctaatgcagctaaagaactgaattttttctttttttttttttatgagacagagtctcactctgtcacctaggctggagtgcagtggcacgatctcagctctctgcaacctcctcctcccaggttcaagtgatttttgtgcctccgcctcctgagtagctggaactacaggtgtgagctaccacaccctactaacttttgtattttttgtagagtcaggattttgccatgttggtcaggccagtcttgagctcctgagcttaagcgatccgcccatcttagcctcccaaagtgctgggtttaaaggcgtgagccactgtgcttgacccggaactgaatttttagtacaagtagttaagtatggcttgtggctcctgtattgaacaactcagctctagggcttccatatcccgattcttagtgaaacctaaattatataatattgaccacatgccgggaaatatagaaaaaatttagaatggaataatctccattataaattaccatggattaacagattatcaaattgacacctgagtgatgtcccattatgtggactctttaaagcttgtccctttctaacttgccagcaaatcatagcactgttcttcaagagtacttcagacttttaaaagatattcaccaaggaaatttctaattgcagatgttagtttttcatcttctagtaggctgacctatatactgaagcatattttgtattgctttgcaagttaataaatataggcatgcctcggagatattgcagacttggtttcagaccacgacaatcaagcaaataactgcaataaagcaagtcgtgaattttttggtttcccagtgtatatatgttatgtttccactgtgctgtagtctactaactgaacagtagaattatgtgtaagaaaatgatgtacatatagtaattaaatactttctcttttttttgagatggagtcttgctctgtcgcccaggctggagtacagtggcgcgatctcagctcaccgcagcctctgcctcccgggttcaagcaattctgcctcagcctcccgagtagctgagattacaggcatgtgccactacactggctaatttttgtatttctggtagagacggggtttcaccatgttggccaggctggtcttgaactcctgacctcgtgatccgcccacctcagcctcctaaagtgctgggattacaggtgtgtgccaccgcacccggctggtaattaaatactttctggctaaaaaatgctaatgattttctcagtcttcagtgagttgtaatctttttgctggtgaagtgtcttcaatgtagatgggtgctgactgatcagggtagtggttgctgaggattgagatggctgtggcaatttcttgaaataagacaaagtttgtcacattgatggactcttcttttttttaatttatttgtttgtttttgagatggagtcttgctctgtcacccatgctggagtggagtggcataatctctgctcactgcaatctccacctcctgggttcagttctcctgcatcagcctcctgagttgcggggactttaggcacatgccaccacatctggctaattttttgtatttttagtacagctgaggtttcaccatattggccagagtggtcttaaactcctgacctcaggtgatccgcccgtttcggcctcccaaagtgctgggattacaggcgtgagctactgcacccggccagtggactctttatttcatgaaagatttctctgcagcatgtgatgctgtttaacagcattttacgcaaagtagaactttcttttatcattggagtcaatctcaaactctgctgctgctttatcaactaggtttatgtaatattctaaatcttttgttgtcctttcaacaatgttcacagctccttaccgggagtagattccatctcaggaaatcactttttttttgctcctccatatgaagccagtcctcatttgttcaggttttatcatgagattctcatgataaagtcagtcacatcttcaggctctacttttttttttttttttttttttttttgagttggagttttgctcttgttatccaggctgcagtgcagtggcatgatctcggctcactgcaacctccacctcccaggttcaagtgattctcctggctcaccctcccgagtagctgggattacaggcatctcccaccatgcgcagctaattttttgtatttttagtagagatagggtttcaccatgttgggcaggctggtctcgaactcgggacctcaggtgatccacccgcctccacttcccgaagtgttgggattacaagcgtgagccactgtgcccggcccaggcactacttctaattctagttcttttgccatttccaccgtatcagcacttactccttccattgaagtcttgaatccctcatagtaatccatgagtattggaatcagcttcttccaaatgcttgtgaatgttgatattttggccttctcccatgaatcacaaatctctcctctcctctcctctcctctcccctcccctcccctcccctcccctcctctcctctcctctctttttgggggaatagggtctcacgatgttacctgggctagcctcaaactcctgggctagaacaattctgcaacctcagcctcctaagtagctgggactccagtcgtacaccactgcacccaggaatattcttaatggcatcagcaatggtgaatcctttccaggaagttttttatgtagtttgcccagaaccatcagagaaatcagtatgtgtggcagctgtagccttacaaaatatacttcttaaataataaggcttgaaaatcaaaactactccttgatccataggctgcagagtggatgttgtgttagcaggcatgaaagcaacattaatctctgtatacatctccctcagagctcttgggtgactaggtgttttcccagtaagcagtaatattttgaaaggaatctaagctctctacaatggccttaaaatagccagcaaaccatgctgcaaacagatgtgctatcattctggctttgttattttatttatagggcatagtctgagtagatttagcataattcttaagggccctaggattttccagatagtaaataagtattggcttcaaattaaagtcaccagctacattagcccctaacagtagagtcagcctgttgaagctttgaagctttgatgccaggcattgacttctcactagctgtgaaagtcctagctaaagagaagtcaatgcatgacatcttgtttcaatagatggctgtttcatctacactgaaaatcatgtgtttagtgtaggcacttttatcagttttcttggctggatcttctggataacttgaagcagtttctccataagtacttgctgcttcaccttgcactttcatgttatggagacagctgctttcactaaacctcatgagctaaactttgctagcttcaacttttcttctgtagctttcttacctctcagccttcacagaattgaaatgagagttaggactttgctttggattacattttggcttaagggaatgttgtggctggtttgatcttctatccaaactgctctttctccatatcagcaataaggctgttttgctttatcatttgtgtgttcactggagtagcactttaaatttcctccaagaacttattctttgcatttacaacttggcttttgaagtagctttcagcctatctcagcttttaacatgccttcctcactaagtttagtcatttatagtttttatttaaagtgagagatgtgacacaagaccatatagaggccactgttcagttattaatttccatataatggcctaacttcaatattattgtgtctgctgaataggaaggtctaaggagaggagaaaaatgggagaggcggggggacaacagacagtaggtggagcagttagaacacacaactttcttaagtttgctgtcttctatgggtgcagttcatggcgctcccagttacaatgataacataaaaggtcagtgatcacacatcaccataacagatataataataatgaaaaaattgaaatattgggagaattaccaaaatgtgacaaacacgaaatgagcacatgctgttggaaaaatggtgctgatagactttctcaacacaaggatttcacaaactttcaatttgtaaagaatgcaatatctataatgcacaataaagcaaagcagaataaaatgagctatgcttgtactcagagcttttccccacatgggaatatctaatgtgattaaataggatttttctagttgctgaaaatgaaaagatgtttttcagagaatttctgttatataatttgttagaggtgtttttgtcttttcatgcttttactgagcaaagtcatgaaaaacgatatttcataattgccagcacgttcaaacaccatttgttagacgtttttgatgaggaagctttgggtaatgatatgaattattgcatctttagaaggatttttcgagaggaaacattttttattctggcttctagagtgtttctgggaaagtaagcaattataagtatgctaagttcagcctctgttttaaaagtatcctatcttgttggatctgcccaaaatactgcctcaaatgagagttttcaccttcctctgccatccttctggtgtattaataataaatccttgaaagatgaaagaagtaaaacagattgaaatgaagtttaggaggtgaattttatgttgtacatggctctcttttctgtgcctagctctttgcagcatttttatcagttacttggataagtgacatttatgtcaagttttctttttttttttttttttttttttttttggagacagagctctgtcgcccaggctggagtgcagtggcatgatcttggctcactgcaagctctgcctcccgggttcacgccattctcctgcttcagcctcccaagtagctgggactacaggcgcatgccaccacgcccagctaattttttttgtatttttttagtggagacggggtttcaccttgttagccaggatgggtcaggttttctaatgatcctgtagtttgacactgtcatgcagtcggtacaatctgaaatgatggcttgtttagccagataaattttcatagttacaaactacaaaatcctctatatgagcttcaaaacacaattgtaagagtacacactgaagtgaagaacacagcttatttagccaggttatgtataaagaggatttaaatgctttaaatgagtgtcagtaccaatcagtagtaaaatatcaaaactgctcctgtgattcttggtttcattaatggaattggagctggcaggaataagagaggtatattgccttttcactcagcaacaaatatttttttagtgagtgccaggtacattctgggcagaccccacctcgatacctttgtgttggaacaagattgaaagaaaagatcaagctcatttgggaattaaaaatcttggttggagggacaggatgctagggagagggttatgattgacttgaaacaaaaaatagtggtgtgaaaattggcagtaatggcagcgttcacataacttagtggtctgttgctgatggagaaggatttgacatctgtgtggttttagggatggacacgagacaagtggataggtgatatagggagaaaaattgggggccagtagaaggaagagttttacagtattagaactccatttaattatgaaaagaatttgtatcttaagttgctgaagtttcttatccctagtggtatattataaaagatattcagactttaggtggatggtgagactaaatggctccttccattcaggagagtttgactcttaatgattgttcatcactcagttgagaagaaaagaaatttgaaggattgcaagcagtttgggaaatcccatttatatattccttttaataacctatggattactgctatgcttgcccaactgagaatctgaatttcttgcattactattaaatctaattatgcatttgtaattgaatggtttggaaggagtacaaaaaggatatatatttttttttttttttgcatttctagtcattacggcttttctagaatctcttctggtgcacgtgtgtgtgtgtaagtgatcctgtacttttaagtggaaaacacaagctccagatagactattgttgtaaaaagtattaatgcagtgaagttgagcaaaagtaagtctgtaaaatggtatgccaaggatacgcttttagcatatgaacaagtttcagtcactttttgggagatagagaattggagttgtgtaggtagaagaaatttgttttcgtgagtaagcatgtgttttgtgaagtaacttgatggaaaatttttcttaccaggaatcagtcatgattgagggacatgccacccgttagtatagttggataaagatcctgctacatcctttcagtgtttgtaaagaaaagatttctgctggtttatgtgaaaatatgggggtattccatttcatgagaggtaatatgtgtaacagttaaaagtacatgcctataatctgactgtgttttagttacagatgggggaggcttccagcaagttatttaatctccctgttcctcagtttttacatatatcttatgacctgttaataatagtacttgccttcaaggtcatttatgagcatgagttaacatatatgttgactgggcacggtggctcacgcctgtaatcccagcactttgggaggccgaggcgggcggatcacgaggtcaggagattgagaccatcttggctaacacggtgaaaccctgtctgtactaaaaatacaaaaattagctgggcgtggtggcatgtggctgtagtcccagctactcaggaggctgaggcaggagaatcacttgaacctgggaggtggaggttgcagtgagccaagatcacgccactgcactccagcctgggagacagagcaagactccgtctcaaaaaaaaaaaaaagtgtatatatgtgtgtgtgtgtgtgtgtgtgtgtatatatatatatataatgcttaggttggtgctttacaaatacatttctctttagcttcaaagctgaattcttagtgtataaaaattagtatattggccaagcgcagtggctcatgtttgtaatcccagcactttgggggaggccaaggtgggcggatcccaaggtcaggtattcgagaccagcctggccaatatggtgaaaccccgtctctactaaaaatacaaaaattatccaggtgtggtggtgggcacccatagtcccagctagtcaggaggctgaggcaggagaatcgcttgaacccaggaagtggaggttgcagtgagccaagatcagccactgcactccagcctgggcgacagagcaagactccatctccccccgacaaaagaaaaaaaaattagtatatcaatataactacatatttagtggctttttttggttcagctatatgttaatattaggaatatcattagaaacactgtttttacttcaaagttactgaggaaattagtttcatactgttcagaaacctcattgaataagatgtaacctcagttattctggacaggctggttaaaagttttatcagaacagctggaaaatagtggtaagaaaatatttcacatacagactgttaaaatttttggaaaacattgcccgtatctatttttcttactctgcataagttaatggattcattttctttctcctctccttaccaccccgtaacaccctatttcttcaggcaacataggagtattttgacattatttgatgatagtgttaccataatagatgatcacctgtgttcatttgatacgccctttatcttggctgggctgccctctacagttgatttcaaaggatctttcagtattaagatttttatcctctgcctgtgttatttagcaatgcccagtaagttgaacagataatgactcttctctacttgaggcttgtatcattcttgtggctcctgatattaactacattataaaaatacttaagtttgttcctgaagtgttgtttacagatcacatgcattgatgcatgatagattctgtttgctttgtaattacgagaaatgcagtccagtaatgggaggtttactgctttattgttccttttagcagccaacaaaaaaatgttgtcaccaaaactgtgtcagtggagataactagaagatggttcctgtagttgtattgcatcccaggttcctatgttaccaactttgcctcctgtgctttcttttcatctccatcacctactctctgtggcctgcccctttggtttcccccatttattccgttctcctgctatacctttctggctgttgtttttctgtgacttaatttctttagggctatctttgccatggggtaggaaggctgaatggggatgagccttggacactagatcccagttcttccttttgagcacaagatcaagttacttataccatctgtgggtggtttgatgcctaagagtaggacaaaataagaccagagtgggcccaaaggtcgaagcttggctttatttggactgatagcaacgaatattttgctgctttatttattttggtgcaagaccacattttaagattgttattatagttctccattttagagctataagtgccctcttatatacctgattagttaaaaagagcaagcaagtctctgtcattaagagtctgatatatattgaaaagtttatttcttaggacttttacaaaaataacaaatgacacagatggcaagtagatcacagagatgctagacaatgccagatcatgaaatgggtgatcatgagatccaagagtaagaaccagtagtcacaactgtacttgtgccaccaagcagacatttccttgcacactactataacttgtggctattaataatcatagaggatttttgccactggatttcagttaaatgtaacttgattctttgattctatgtgtggttaaattctcaagtgaagaactgtcattctgattttctagtcttctttcttctcctattattactaaatagaaagatatttttgttgagctgcatgctatttcctgtcccttccaactgatctgtaagcttttccattggctttctttctgtttcctgctgctttcttgcttcatatttgaagggaggattcagacctatccaggtaacaaactactggttctgcatggcctctttataactcagtctgcttattattacattgagattgattgctaatgaatggatacattcacattggaaatttactattggtatattgtttcaaggcttttaatcttgcagtgaaaattataactacaggtactggttgccattttgagaaatttgaactctgctgattccagaccattcttaggcctgtctagattgtccacttttattgcaaactattctagaaggctcagtttagtatgggattgtgccaccttttggagaggaaaaaaactgcttagttcagcatgtgacaaccctacagatggtttaatttagcttgaccctgatggactgggtaaatattttatgatcaaagagattccttgttcttctaagtattttataaattacttgaacagcagtcttttaggaggctacttttaatttttaatgatttgataatgaaccacttactctttatcagagtcagttcttttatataatagagaaatatcaatattagctaccccttttgttatactttattatacatatatgtatgtatatatacagtatgtgtgtatacatatatgtatgtatatatacagtatgtgtgtatacatatatgtatgtgtatatacagtatgtgcgtatacatgtatgtatacatacagtatgtgcgtatacatgtatgtatacatacagtatgtgcgtatacatgtatgtatacatacagtatgtgcgtatacatgtatgtatacatacagtatgtgcgtatacatgtatgtatacatacagtatgtgcgtatacatgtatgtatgtatacatacagtatgtgcgtatacatgtatgtatgtatatatacagtatgtgcgtatacatgtatgtatgcatatatacatacgtatatatacagtcgggtcgaaaccaccctactgttttcaaatatgtgatgatactgataagagcttgccctagtgtggtatatttttgggaacccagcaataggtaatttattctttttatgcatattgtatttgtaattcaagttgaccagatttttattagtgaagaaaaggagacagtaaaatttatatattcccctgtgttaaaaaaaaaaaaaaattttttttttctccccttcccagtttttccagaggcctcaaatacagcctcctagagctaccatcccgaacagcagtccttccattcgtcctggtgcacagacacccactgcagtgtaccaggctaatcagcacatcatgatggttaaccatctgcccatgccgtacccagtgccccaggggcctcagtactgtataccacaggtaaagtatctttgaggcctaggtggtccagcaatagagtggaaattaacccggattcacatcagagggagctgggtggatgaattgtggtattagttttcggtgacgtgtgaactgttttgttggttacaaatctagcccttttgtgatttttcattatgctgtgtgaagatatttctacatctgtttacttaaaattttttaaaatgataaattgtttttatctacttgctttctcccatccctttgccacaaccaactgctctaaaatggactcagtgattatgctgttcctgaaatcctttaatgtcattgaaaagctactagcctgagattattttacagtgagctgatgtctgcctgtgcactgatatgttgtatggctttactaagctgcacctttctcttcattctcattgtatcttgatggcaagcaagcatttttaatgtgtttgacccaatcgctttacctcatttaaatgattctcttacacagagaactttactttctgtagtaagctactttcttattattttattatgtttttcgcccccagataccatattatttataaatattcatactttctcttttctagtaccgtcatagtggccctccttatgttgggcccccccaacaatatccagttcaaccaccggggccaggtcctttttatcctggaccaggacctggggacttccccaatgcttatggtaagtaggaaaagtcaagacatttctgctagttttttgtgtttatttaattttgttgcttggtgggttggtttatacaatgaggtttagtggtaagaaggatttttaaataacatgctgctaacagttctttcttgaaagctacttttttttttttcttccagaaatgggagtctcattatgttagtcaggctggtcttaaactcctgggctcaagtgatcatcctgccttagcttcccaagtagctggacctactggcacatgccactctgcccagctttaaaagtaattttttggctgggcgcggtggctcacgcctgtaatcccagcactttaggaggccgaggcgggcgaggagattgagaccatccaggctaacatggtgaaaccccgtctctactaaaaatacaaaaaattagccgggcatggtggcgggtgcctgtagtcccagatattcgggaggctgaggcaggagaatggcttgaacccgggaggcagagcttgcagtgagccgagatcacgccactgcactcagcctgggtgacagagcgagactccatctcaaaaaaaaaaaaagacagaaaagttactttttagagagtggcttacaagaggagtattatagaaatatatttagttaatgacatcttctttacaagctgataattctactggaaagaatcatgtttcagagttctgacatcttccaccagttcactgttacctagatttttactggatttttgccagtggcatgaatataccttatcctcctttcacaatctctttttctccaaacatttcctaccaccttacaccttaaagattttgttaatgtctttcttagtagaatgcaatttccatgaaagtagagatttttgttttgttcactgctatatccccagcccctagaacagtgactggcaggcacttggagaatatacatgccataactaaatataactcagtgaacctgtgattctccgcaaaattgtgataagatctatggcatgggggaggttttgggtattagttccaatgaaaatgccttgaaaaattaaaagtgtttttaatttagagagagctgggttgccaagattattggcatatgcgccaatgctgaactaaaaatgataaaaattacttacttcattcaacaaatttttacttcatattacatttctcttattccatggaaggtgaataataagggataaaattagtagatactagaaaaattaagttttgagattcagtaagcattgatctgttatataaccaacaaagcaaaaacttattaaataatcttaatataacaggataacttatccattaaccagtttcctaaaattgggattgtctcagttaagattacagcagaattgatttgattcaagtagcccaagaaggtttttttttttcagttttgaggtgaagtaggcaaagcaaccaaatgttacgtggctttacttcttttagagaagggaaaagttttctgttaccttggttgatattgtcttgggaaactgctatttcaaagtgatacgcaatacccttcacttatcctcagggaatacattccaagacccccagtgggcatctgaaacctcacatagtaccctatacataccatgggtttttttttttttttttttgatctgataaaagggctactaagtgactaattggcatgtagcgtgtacagcatggatacactggataaagggatgattcacatccctggtgacatgaagcaggacagtgcaagattttatcatgctattcagaatggcttgcaatttaaatcttatgaattgttaatttctggaatcttttgtttagtattttcagactggttgactgcaggtaactgaaattgcagaaaagggattaatactacattttatataacctcactaaatgtctcaaatatgtttatttaactcagctttattaagttgtatcattactatgaaatttgatattttcagaacaataatgtgttacatatatgtgagtttaaaagttacacaatatatatatatatcacccaatttttgacagcatattgcaagtgctgttgaagtattccttgtgtaatccttggacttacctttgtcaccatttttatgtaattctagtgcctttattctaggtccttattctgaaaacttaaatccaagtaattatttttgagagtaacaatggttgttactatctagaattttttaaatagaaaacaatgggattattaatcagcatgaacatgctgaaatagacagtgtctcccgttaatttctgtgttgcaaagggaatacaattagtcttctaatttacaacatcatttttaaagatgtcttactgaattgtaatctgcttttttacttagtgattatgccaatcactttactcagaaaatgtcatcattaaatttcctgctgtaagtctgtgccagccctctttattgcttttaatactattgtacaatatgtatagaaacagtaatgatgaatttactagtagagacataatgtgcagatttgaatgtacaatattataacattttggctttatttctattagatatataccatttttattcatttttatgaaaaagcagtatgttgaggtataattgtatctcagatattattgatgtctgttccctttcatagatatgctttcttccccagtaaattctcatgcagatccagtagacatcaagtgggcagttaatcatctagattaaaatattgtttctctagttttcttaatattagaaaaacaatcttaaaataatttatttcattatgaaagtaactaaattaatgataaaaatttaaaaaggccgggtgtggtggctcatgcctgtaatcccagcactttgggagaccaaggtgggtggatcacccgaggtcaggagttctaaaccagcctggccaacatgatgaaaccccatctctacttaaaatacaaaaattagcagggtgtggtggcgggcgcctgtaatcccagctactcgggaggctgaggcagaagaattgcttgaacccaggaggcggaggttgcagtgggcagagatcatgcccctgcactccaacctgggtgacagagcgagactccatctaaaaaaaaaaaaaatttcaataatatagagtgcataaagttgaaatagccagtttctctcccttcccatcctttaaagcaataacatttaacagtttgatacgtattttttttttcatttatatttaacaagtttttttaacttaaattaacatggaatatttatagtagtgtaaataataaaacttcctggttattgttttcctttcatactatattcatgggcatctttctatttcattatctatagaacttctctcatttcttttaaaatatacataatctatttttggaatgaatcacaatttatgatacctaatttttagtactttagtagagatggtgtttcaccgtgtaccaaggctggtcttgaactcctgagctcaggcattctgcctgccttggccttccaaagtgctaggattacaggcatgagccactgcgcctggccatgtttattattgtttctatggaaaattcaaggttttgaattttttttagaagacaggcagtgtgctagttattttgtggaatacaggtgttaagatactcttcctgccattcagtttcttatagtaagtctgttagatattgtgctgaggtttaaacagtgagaagaaatctaaatattgactgcaccattggtttcacattatagacaagtaaaatgaataaaaagtagagtaaaataaagtagaaaacatacatgactattaaatttataatttggccaagaagacctttaaagaaaactgccgtttactgccagtatcatttcatgttttaacaacaaaaatcatcaaataggagcagtcctttatacaaattttaagttgttaaacctctgtgtgacactggggcctgttgtggggtggggggaagggggagggatagcattaggagatatacctaatgttaaatgacgagttgatgggtgcagcacactaacatggcacatgtatacatatgtaactaacctgcacgttgtgcacatgtaccctaaaacttaaagtataataaaaataaataaataaataaaataaaaatacaaaccaaggttcacataaaaaaaaaaacctctgtgtgtgtgtttgtatttcatgattgttattgtattcattttgcaatacatcattgacactttttatatagactgaggtttgggaaccactgatttagaactgggatcagtaaactttttttttcagtaaagggctagatagtaaatatctcaggttttgcaggctgtatggtctctgttgcagctgttcagctgtgccactgtgatgtaaaatcagccatagacagttgataaactactgtacgtgggtgtcttccaataaaactttatttaaaaaaataaatagtggtggactagatttggctcttagactgtagttgacagatctttgatctatacaaatgtacttcattccatgcataagaaatttgaggtccagagacattaattaacttaactaattaataaatggtatgtaaaaattactcatttctagtggaataaaaatgtttttaaatgtttctgactagcttattataaatattatatatttataataatatactattatattagtagtataggcagtagtatattagtagtagtagggcagattttctactctgctagagctcacagttaagaagacttaatgttttgctaattgcatttaatcccactatattgagattatcttgttctgtcacatttattggattaatgtgatataccaggctcttccccaatcatgtaggctcaaaaatgtttcatgagaagaatccaggttttttttttttttgttttttgttttttttaagagatcaccttttggatcttatttcacttacctcaaaaaatatggtgaagtgagcagattgtgttgcttgcctggcagcatttgaaaccaattttggggatttgttttctgagttaatttctgagccagtgacataataaagtagcacataattgctaatttgagttctgctttgagaatagtttactcattgttagaggatgactgagattttttttttggtctttttacattgaacttactgaaatcatagtcatgccctctgcttagatcttttccaaatctgattcagcaaacctgattgatacctacagaattctggtactgcaaatcatggtgcttccaacaactttacacttgaaaagtgttatggtggtagtggggatgttgatggtgataatgaaagtgggccagccttatttgactgtttgcttagtaccaaggattttacctgtgtgaactaccctcgtacatatttttttccttcttgttacggtgaatcaattatccatgttctatggaaagccaatcttttatgtgtgtactggatcccatcctgtacccatttaaggctattactctagcaattctttctttcccacattgacaattttccccccttcctctgctggattagtgtcatctgtatataggaataggcacactgtttcattgacatattaaggaaagtttttctgattccatatttttgtccagctatagctcaatttttctgcttttcttttacggcaaaatttttaaggaaaatatttgtactcatggttttcattttccgtcttctctttcactattgaacccactcaaatcaggcttcacactcttcacctctctgcccaaacaacttttgtcaaggtcactggtgatttgtactttgaaaaatcttatttgacctcttcagcaccatttgatgtggttaagcacagccctcattcttgaataattttcttgatttcaaccactgccttggttttcatctctttggctggagttttcccaatttctgtgacctctaatagacatggaatgccccaagatttaaccactgggcttcttttctatctgtattcatttcctgagttatctagtcttgtttaaatgttgtttatattctgtgaattccagaatggataactgtaactcatacctatcctctgactccagatttgtgtcactttctaactacttgatctgtatttgaagatctggtaagcacccgaaacttgacctgtctaaaactgaactcttgatttttctgccccaaactctattccttcagcattcctcatcttagcaagtagtacctctgttctttcacttgctcaggcataaaactgaaagagttttccttgagtcttctttctctcacaccagtatccaattcatcagcaaatctataggctctaccctcaaaccatccagtatttgaccccttctccacacctctactccaaacaatttggcttgatagtaattataataatagtcttaagttttgaaagttaaaaacagctcattgggagtacaaggagtgggggaagaagataatttcaggcagatgggcagtacagtcaaaagttgaagagattggtgtactcaaaggataggagttaggagtaggttatagctagaacaaagatgtggattcaagaatgatagaaaatgtaatttggaacctggattctaagtatctggactttatcttaaggccatatgttctgagccttttttccaccccagtattcggaaatttgctaatcctttatgtacctccctatggcagtagttccccatgagtaaggagaagaattagatcacccctactttccaagatgatcagatatattcccttctgtccctgacaaaacccataaacaaacatacacatacacccttgtgtgagagtcacagttgcatgtggtaagcctcagaataatattttttaaaagcatcactatagcatgatccatgttttagaaagacaactgtggtgtggatctgtaggaaccgagtatttagtggttttcatattggatgtttgtgaatgtttgaagacattacatattttgggaataatttcttgaccacttcagtaactggaggagagctagtggaaaaagatgatgaagaatgcttagtgtttttgtttttacccttttaaggggattgtgcagagacacagtgtcattgctagttctgtagtgtttgacaaaataactgaatgcctatttaattttttccaactttttaggaacgcctttttacccaagtcagccggtgtatcagtcagcacctatcatagtgcctacgcagcaacagccgcctccagccaagagagagaaaaaaactgtaagagatttttattactttttcttattttaaatctaaaatctattcacttatcagataagtttacgtagtcattattcatctcaattcacaaattactgtgccttttttttttttattcttcccttatagtcacaccacttcacctggaggatttgtatgggcatgtaattagaagttgttcataccatttgcataatatcatctttaattattcactgagctaggtttgctacatgacaacatgtactccacctttagaactgggagggtttagtgggctaaggttttactcagtgtgaggaatttaagctcagttctcacatctagactctcctttaacaccagtctttttctttttttttttgagatggagtctcactctgtagcccaagctggagtgcagtggcgcgatctcagctgaactgcaccctctgcttctggggctcaagcgattctcatgcctcagcctcccaagtagttgggactacaggcacaagccaccaggcccggctaattttttgtattttagtagaggtgggatttcgccatgttgcccagggtgatctcgaactcctgagctcaagcaatctgcctaccttggcctcccaaagtgctgggattataggtgtgagccaccgtgcctggccaacaccagttttaatcagctctccattcaagtatgaattgacagaagaaaaaaatagcacaaggaaaaagaactgagatattaaggatagcaagaaaaatccttcctgtgaaatagatatcttttaagaaacaaaaaacagagtttagaaaatgtattctaattgttttttataatttataggggttttgtctttgtctaatgaggcaggcccaagagaattggagtgtagtaatataaaagtcaaatggcagaaaaattgtagaagagtggcttgcaattccttacgcaacagaacagacaaaatgggtgatctttttattcaagagagactcccacattcacacgagtaagataggtggggtgatttatagcaatactcttgaattactctaacttaataaaaattaatgaggttcaggccgggtacagtggctcacacctgtaaccccagcactttggaggccgagatgggtagatcacttgaggtaaggagctcgagaccaacctggccaacatggcgaaaacccatctctactgaaaatacaaaaattagctgggtgtggaggctcgtgcctataattccagctactcgggaggctgaggcacgagaatcacttgaaactgggagggggaggttgcagtgagatcgtgccactgcactccagcctgggcaacagtgtgaactgtatctcaagtaaacaaacaagaaaataatagtgaggttcaagactttggtttaaaacttgtttttatcattagaaacaaattacttgtgcatatatcataatgaacaggacatgacaatgtatcatgacactacagtcaagaaactatatgctttggtaatgttgaatcagcatgatagaagttggacttgaagaacactctcagaatgcagaaaaatgaatagaagaaatgaaaccggaagacagtagttacagatgtttctaaagaagaaagtagaataaatgaattaaagctatacttaaaactttattagaaataattttccatacctaaacaatagctggcattagaagtcttaattgaaggactcccctaaaagcgtccagatccaggtagtttcattagtgaattccttgaaattctcaagaagtgtggactgccttgattaaggtatggtggtaataaacaacagtgggtcctttatatcttagcactctcccagaatagaatgcctagtcgcagacacttacctcctttacagcaccaactccactgacatctttaagcatagggtagcctttaaaaaaattaaaataagaccatacacactttgtgcttattgcattttttcacctaccagcacatcttaatgattattctgtgtcagttcatgtagatctgcctcattctgtttttttgagacaaagtctcgctcttttcccccaggctggagtgcagtggcgtgatctcagctcactgcaacctccgcctcctgggttcaagcgattctcctgcctcaatctcccaagtagctgggattacaggcgcctgccaccgcacccagctaatttttgtatttttagtagagacagggtttcaccatgttggccaggctggtctcaaactcctgacctcaggtcatccgcccacctcagcctcccaaagtggtgggattacaggcatgagccactgcgcccggccagatctgcctcactctttttactggctgttaagtatttaattgtaaggacgtaagataatttttttttttaaatggagtcttgccctgtcgcccaggctggagtgcagtggcgcgatcttggctcactgcaagctccgcctctcaggttcaagtgattctcctgcctcagcctcctgagtagctgagactacaggcatgtgctaccacgcccagctaattttttgtattgttagtagagatggagtttcatcgtgttagccaggctggtcttgatctcctgaccttatgatccgcccgcctcagcctcccaaagtgctgggattacaggcgtgagccaccgcgcctggccgacgtatgataatttttgagctattctgttctcgatcaacctttttccagtctttgctggaaaaggcatgattgcagtcagcattattacatttgtatataaggttgttgtcagaataaattattcctaactcgtagggtatttatattttttattttggtaaagaacttcagagaattatttacagcgtttaaaactttattctacgccaggtaccgtggttcacacctgtaatcctggcacgggaggctgaggcacgagaatcgcttgaacctgggtggcggagattgcagtgagccgagattgcgccactgcactccagcctgggtgatagagcgagactgtctccaaaaaagaaaaaaaaaggaacttttatctatgcagtaactttcatatattaaaagtattttatgaaacttgtatgttaaatatggtaaataaaatcagtcttacaggttcttacaaaacaagtataaatattaatagtttgcctttttgacctagaaatccagccaactaggtttcattttagcttgttattctaattagttcatgtcagagctaatggcctacatttatctgatggatctgtgattgaaataaagtcaaatgtggtgattatcacctttgatatttgacaggtttcccagtttgcacctttaactcacttatatgcctataaatttgctacacagacactcatctgtacatatgtcattttatttaaccttatagataagaattcgggatccaaaccagggaggtaaagacataacagaggagattatgtctggaggtggcagcagaaatcctactccacccataggaagacccacgtccacacctactcctcctcaggtaagacagagtgagctgtaatggatggcactatttgttcactaacctctactgaactcttctttcttctatagccactttctgtacttttcatttccatcagttgtctcgcagcctcgaatatctaaatggtatttaaacagacatgttttttctctttgcaaattataatatttttaaatttttattggtaatatatttatgtattgttttcacaatcagagcacaggtgaggtgctgccactcttcttaatgaactatcgcatgatgccaaaaggagctgcattcttgtagaaacctcatcattaaatgagtatttcacatttcacatggaaccttaggatttaagtgctgcaccttttgttaacgcaaacattaaggttgagaatttaacatttttaccaaacagtgttgcttgagatgatttcctgtgttattgagagcatattaggatgtataacaggtatacttcttaccttttagaactacataaatgagcttcttgagtgcagagtgtcttctttaattacagtcatcccttggtatctacaggggatttgttcaaagatgccccctccacagtaccaaaattcgtggttgttcaagttcattatgtaaaatggcgtagtatttgcatataaacagtgcacatcctcccatatactttaaataatctctaaattacttataatatctaatacagtgtaagtagttgtcatactgtagtattttaaaatttctattgtgtttttatttaaaaatgtttttttctaaatattttttatccaccgttggttgaatctctgaatgtggaacttattaataaattgtcagttaggcacctttttcttcctggtgaagaatgtggttatcataatctcctaagatgttactttcttgtttttagaaatcaagatattgtagaggaaactggagtttagtaaactataatagagattagattccgcaaatctgacaagatttgtatttcaaggccgggcgcgttggctcatgcctgtaatcccaccactttgggaggctgaggtgggccaaatcacccgaggtctggagttcgagaccaatctagccaacatggtgaaaccccatctgtactaaaaatacaaaaattagctgggcgtggtcgcacatgcctgtaatcccaggtactcaggaagctgaggcaggagaatcgtttgaacccaggagacggaggctgtggtgagccgagattgtgctgctgtactcaccagcctgggcaatagagagagagagactctgtcttaaaaaaaaaaaaaaaagatttgtatttcattcctcctatgtcactttgcattttgataaatgatatagagacacgtggttttcagatcttaaaaattatctaaagtgaagccaattgcaggtgcagtggcacatgccgatagtcccagctatttgggaggctaaacaggaggatcccttgattccagcttgggcaacatagcaagatcctgtcccttaaaaaaaattgtctaaagtgaaagcctaatgtctagaaacagataaaaagaaagctattaaggagtagggggctgctctctttgctcttttatgcctggatggtaaaggggttccttggagcccagtttacagacaagtgatatggatgatcacatagaaagcatttcagaatgatagactattgacttcattttagtagtacagacaaaaataaaaagttcataaaaatattcttaaatatcaaaatcacaaacagctggctgagtttagagccccttggaaatctgtggatttgagaaagacttaattttggtcctttgttgtaatgatatgttttctcttggaaatgatggtatctggctgacatttatctcagtctttcattatccagatgagtatatatgtccatctggacatgtgtgttgtaaggtcatgttaataattcttcatcactcctcattattcccctagggacattccaattttggaatgattaagcaggtcttatatttagtctcttccctggaagtgagcatgggataagcaaaattttcaaattgaagtaatctatatatgtgctctgttaggtgggggcacactatagcaaaactttgcaattagttgatcagtgcagtcaaattttagtctgtattttcaaacatattaaaatgttactactgtcaagccagataaaggatagacaatcctttgttgatttctgtttaaattctcaatttggacatgtatgtgtctttttgcacttaaatgccctgtggggtgtgattggttttctgtaactttccaagcttggttcccaccctcttctggtatccctctgtgtttagctacagacatctttttgttctgtgtctttccccagagactgtggttctgaatatgagtgtatatttctctataatcataaagcacatcgaatctacactttcaacagatgaaggccatcagtcaatagtagtaatttggtagttctttttgggaagtgtaacatcagttataaagcataagtttattaggtgaatttcatgcttttaaatccaaatgcatgaaattcatggaatgaacgaatagctttttaacagagacgtgtactagagatatttcattttcctcttaagaaaaacagtagcacaagcataatgatgacaactgacatttgacctcattttctggagcatcatagaaaggatgcagtggctcacacctgtaatcctagcactttgggaggctgaggcgggcagatcacttgaggtcagaagttcgaaaccaccctagccaacatggtgaaaccttgtctctgctaaaagtacaaaaaaactagccaggggtggtggcaggcacctgtaatcccagctactcgggaggctgagacaggagaatcgcttgaacccgggaggcagaggttgcagtgagctgagagcaccactgcattccagcctgggcaacagagagagactgtgtctcaaaaaaaaaaaaaaaatgttgacccattgtttcagaagaagctagaaatgtttagttatgtgtaaaaaagctgcaagttataaatattggcaactaatttccttaacaaaatagcaatctgccagccaaagaagactcattagatttaacttcagttttactagttttcaattttgacatcaatccagataaatacagaatcatatctggttagaagactacagatgagacagccctctgcatcagaatttaggattcaacagtaaatactgtagtattggccttaaagtacctgctttgagttagacataattgcttatgctgtggataaccaagcctttccctatcaccgagggaagtcccagtctctgtaaagggaaacagaagacctgttactaagatctgactggtgcagaggtgaccaagtggggcagaattgtagcacagataccagagacccattaatggtggtggtacatgtgaaatagaacagggaagaggtttaaaactttgacttggaatcagacataactgggtttcatgtgtgggttccactgcttagctttgtaactttagcccaattactttatcccagagcattgctttctacatttaaaaagtaaaacctatcacacagagaggattaaatgagacaaaatacttaaaaattgtttaagttcagtgcctggtgcgcaatgaatattcagcaaatatctattactaatattacaattattattatttcaggaggcacagagaatgactggaagaacgtgggaaggctttaccacagagacaccatttgatctaattttcatgggtattcacaaaatgaaagggaaaggggtattgaggcagaggaacagcatgtgcaaaaatgggaaattagatgaagggaggctattattatcatatttcaggtgagaaattcattgaaggagaggaagccagttggagagatgtttagcaattagttactaactagataaggactctaaaaaggatgaccatataatttaccatctaaattggggtgattgtggaaatgaatggcaatgctattgttaatgccagcacagcaggcgtaatcagtactgcacatgtaaatggggatgcaagttttctccagatgtaagggagagagagagtcagggatgcctcttcatgtttaaaaatacgtcttttgtagtgaaacataatattgagtatacatggggaagtttaaagagcgggatataatgagtttgcttttggcaggtggtcaagccattgtgatttttatctaatttggtcttgaggtttctctgtcaagagtggccataaaccaggatagccactctctaagagagccctgaccagggaaaagttatgtttgggtgtgtttgtcaggtgagacataatgaggaagtgaaaccaaaatgcatgaaacagaaaaaaatttactacttcctaatcccagagaggttagcagtgctgatgggaggctgataggggagctctgaagacagcagggaactcacccagcaggtggagagagagagaaagacgactcgtgggactgtccctttattaaggtccatgtcctcccttaggcttccccactggagttatggatttgctagtttgaagaaaacactttcaaagggtgaacttacttacaggactctggtgttaaccattaggttttatcatggtcagcagctatgggatatgttgtgttttgggtcagtgagatgaggaacaaacggcctctttcacaagcaactacacaggaaggaaatatttgaactaggccaaatgtgaaagggtttcaaaaacatatgctagccctaaaagtggatgccgagggagcaattatattaaatttgtgacacaagctatgagttaattgagggaaactgcattgggtttctgtgaggagaatggagaggagaaacaaatttttgctgctgctgtttttaccctaatgagaagtagacagaatttgaaactgttcttcaaagtcttaaaattttctgtgggttagctagtagagattttgtatctcacatatttaggaaatatgcatatgtgtatatacatgttccctgtatatacacattggatccctgtatatgcacagaggatcacagtgcgtagatggaggtgcatggctggatatcatggctcacgagaacacttgctgctggttttcactgtgttacttagatttatgaccttgggtcagaacattaagttcttaaaacccctattttttcatctgtaaaatgaggaattgtacgaaataatctgagagttcccttttagttcttacctattaaagtgggaaagaaggaagaattttgttactcgctcagtatcaaatctctcaactcctgatgatgacagtaaggcataaggaatatccctgtatttagaaatatgctagctattatgcctaatagtcttcattgaaacccggtagtgtaaaaataaatacatgatgccatgtcaagattgtctacttccaaataggatgaatggtggatcaaaaatcacttaattttttttttttttttttgagatggagtctcactcactctgtcacccaggctagagtgcaagtgcggtggcacaatctcggctcactgcagcctttgcctcctgagtagctggaattacaggcatgtgccaccacgccagctaatttttgtatttttagtagagacagggtttcatcgtgttgacccaggctggtctcgaacacctgacctcaagtgatctgctcgcctcagcctcccaaagctctaggattacaggcatgagccaccatgcccggccaaagatcacttaatttttaaaaatgaattatgtacctttcttccttgatatactctttttcccccctgcttctagaattattattgtaatgaaacacagttatgacatgggagagagtcctatgctatggggctttggggtaggaaattatggattgatagcgtatcttaggaaagatacaatctctcctaccatttgggaaaattactaaagtcagcaggttattcagtcttttgttgagctgcttatgaagttgatacctgcaaaccttaaattccatgaccatttattaattacagttgacccttgaacaaaatgggttcgtttatatgataatttttttcagtaaatacattgggaaattttttggacattgtgataatttgaaaacttccagatgacatattgcctaaaattatcaaaaaaagaaaaatttaggtatgtcatgaatacacaaaatatatgtagatactggtctgtgttttcatttagtgccataaaatatatacaaatctattataaaagttaaaatttatcaaaacttaggtacacaaatacagaccatacagagagaccatacagaccatacagagagaagtgtcaacagacacaaatatgcaatctggacatggtggtgcacgcctgtaatcccagcactttggaaaactgaggtggaagggttgcttcagcccaggagtatgagaccagcctgggcagcatagcaagaccttgtctctcaaaaaaaaaaaaaacaaaaaaaaaacaaaactacaagaggcaatattacatcctaacttcataaaattaactgtagtacatactgtactaatgtaattttatagccacctcctgttgctattttagtaagctcaagggttgagagtatccgcttaaaataccctgtgacactaatcatctccagatgagcagttcatctctcctgtaaattgtgcctcatagtaaaaagtaatttctctttgttgttacatattttttcattgtgcttagtgcattgccataaaccttgaataacaccatgggacccatacagagtgccaccagtgatgctggcagtacttccaagaggcagagaaaagtgctaacattacaagaaaaagttgagttgcttgatatcaactttttgatatcaagatatgcttgatatctaccatagattgagatctgcagctgtggttgaccaccattttagacagatgatttattttataaacagatgatgtaaacttatgatactgataaatacagcatagtattggaaatgtattttctcttcctgatggttttcttaaacacattttcttctagcttacattattgtaagaatatagtatataatatataaaacatacatactgagaaaaaaatatgttttatcggtaaggctttcagtcagcagtaggctgttaccagttaagtttttggggagtcaaaagttatacacagattttcaactgtgtggggtcagttcctctagctcctgaattgttcaagggtcaactgtagttcatttcatggtttagcagtaatagtttcctagaattgggtctatagcttcggttatgatattcatgttatatgttaatatgtgcagtaaatagttacattcctgcatgaagaatttgaaggtgatacctagtataatgtaaacaaatccaatcttttaaaatttcattttgtcatctcagtcataggcactgataaattaatagcattctgtaccttaaagcatacaggtatggtttttgttttagtggtgactacgataaaaatagtggttactaaattaaattatatttttctttatctttaatgaaataacttatcattagtaacctcccttgacttaaatggttcttttcaataatatgtaaagccttgtagactttaaataggtatctaaactggggtggattctctcaaaagtttttaaatgggacatttgaaaagtgtcctattctctgttcgtcatgatgagcagagatccttgctttgttatgctgtttcatagattaaaatgaatttgtatacactatatggtttgatagaggaaataagatctagtgtttggtagatcagtaaggtgactatagtttacgataatccattgtacattttgaaatagctagcagagaagaattcaaatgctcctagcataaagaaaagacaaatatttatctttgaattatgtgaatgtgttaaatttttgtgggtacactgaaactgtgtacatctgttacgcagtaataaaaattattattattatttttttgagacggagtcttgctctgtcaccaggctggagtgcagttgtgcaatcttggctctctgcaacctctgcctccctggttcaagcgattctcctgcctcagcctcccgagtagctgggattacaggcatgcaccaccatgcccagctaatttttgtgtttttagtagagacggggtttcaccacattggccaggatggtcttgatctcctgacctcatgatccgcccacctcggcctcccaaagtgctgggattacaggcgtgagccaccacacctggccaataaaaattatttttaaggaatttgcacacagaccatcaaagacctactcattgcttatctgacagaataaaaaacagtatcttgtttaatttttgtgtattctgtgaagttaagaagttttcgatgttcaccagttatttgtgggtgtatgaattatctgttgtacacgtttcttttgggtgatgatttttgtctgacagatttataagagggctttacatgttaaataaatactttgacatatgttaacatttttttcttgtttgatgattgtgttttagctttgttaatcgtgccttctgtcatacggaattgttaaattttctgtttcatttatttttttgagacagggtcttgtctgttgccctggctggagtgctgtgacacagtcacagctcactgcagccttgacatcctgggctcaagcaatcctcccacctccacctcagccttctgagtagctgggactacatgcacatgccaccatgcctggctaatgttttttattttcagtaaagatgaggtctcgttatgttgcccagactggtctcaaactcctgaattcaagcgataatcctgcctcagcctcccagatttctgctatgagccactgcaccagctgaattttttttttattttgaaacagagtctctgttgcccaggctagagttcagtggcatgatcttggctcactgcaacctccgcctcctgggttcaagtgattcttctgtctcagcctcctgagtagctgggattacaggtgcctgccaccatgcccggctaatttttgtatttttagtagagacagggtttcgcctgttggccaggctggttttgaactcctgacctcagttgatctgcccacctcagcctcccaaagtgctgggattacaggcatgagccaccgtgcccaggcagaatttatttttgatatatacacttatatatcaaaatgcacttagattagttccacatctttgcaattgtgaattgtactgctataaacatacgttttcaaatctctttttcatatgatgacttcgtttcctttgtgtagatacccagtagtggggttgctggatcaaatggtagatctacttttagctctttaaggaatctttgtactgttttccatagaggttatacattcccaccagttttacattcccaccagcagcatataagcattcccttttccccatatccatgccagcatctattgttttttgactttttaataatggtcattcttgcagcagtaagatggtatcgctttgtggtttcaatttgcatttccttgatcattagtgatgttaagcatgctttcatgttgtttgtaggccaatttatgtatctttttttgagaaatgtctattcatgtcctttgcccactttttgatgggattattattattattattattattattattattattattattgctgatttgtttgagttccttgtagatttccttcatcagatgtgtagtttgcatctctatgggttgtctttttactctattgtttcttttgctgtgcaaaaggtttttagtttaattaggttctatttatttgcgtttttgttgcatttgctttggggtcttactcatgaattatttgcctgggctgatgtctagaagagttttttccaatgttatcttctagaatttttacagtttcaggtcttatatttaagtctttgatctatcttgagttgacttttgtacaaggtgagaaatagggatcgtttcattcttttacatgaggtttgccagttttgccagcaccatttgttaaatagggtgtctattcctcaatttatgtttttatatgctttgttgaagatcagttggctgtactttcttggctttacttctgggttctgtattctgttccattagttatttgcctacttttataccagtactacgctgttttgttaactataaccttgtatgatttgaagtaattgtgatgcccccagatttctcctttttgcctaggattgctttggctacttgggcccttttttggttccatatgaattttaggatttttttttctgattctgtgaaacgttggtattttgatgagaattacattgaatctgtagattgcttttagtagtatggccattttcacaacattgattcttccagtctatgattatgggatgcatttccatttgtttgtgtcatctgtgatttctttcagcagcgttttgtatttctccttgtagagattttcacctccttagttaagtatattcctaggtatttcattttatttttgcagctgtggtaaaaggtattgaattcttgatttaattctcagcttggtcgttgttggtgtatagcagtgctactgatttgtgtacatttattttgtaacctgaggctttactgaactcatttatcaaatctaggagtcttttggaggagtctctagggttttctaggtatacagttatatcatctgcaaacagtgatagtttgacttcctcttttccaatttggatgccctttatttctttctcttacctaattgctctagctaggacttccaaaactatgttgaatagaggtggtgaaatgtaggcatccttgtcttgttcctgttgtcagggagaatgctttcaactttttcccattcagtatgatattggctgtggttttgtcatatatggattttactattttgaggtaagtcccttttttgcctacttggttgaggattttatcataaagggatgctggattttgttgaatgctttttcagcgtctattgagatggtcatatggtttttgtttataattctttttatgtgatgtatcacatttattgacttacatatgttaaaccatctctgcatccttgaaataaaacccacttgatcatgataaattatctttttgatgtgctgttgcatttggttagctagtattttgttgacagtttttatatctgtgttcatcatggaaattggtctgtagttttctttttttgtgtgttctttcctggtttaggtatcagggtgatactggcttcatagaatgatttagggaggattctctctttcccagtcacttggaatagtttcagtaggattggtaccagttcttctttgaatgtctggtagaatttagccatgaatccatctggtccaggctttttttgtgtgttggaaattttaaaattactgattcaatcttgctgcttgtcattggtctgttcagggtttgtctttcctctgatttaatgtaggagggtggtatgttccaggaatttatccatttcctttaggttttatagtttgtatgcataaagttgttcatagtagtctcgagtgatgttttttatttctctggtgtttgttgtaatgtctccagtttcatttctaattgagcttatttggatcttctctcttttcttggttattctagtgaatagtctatctattttttcaaagaaccaatgttttgtttcattgatcttttgtaatgctttttttgtttgtttgtttgaatttcatttagttttgctgcaatttctgttatttctttttttttttttttgagacagagtcttgtttagtttgtgcttgtgcttgtttttctaattccttgaggtatgacattaggttgtcagtttgcactctttcagactttttgatgtagacatttagtgctgtaaactttgctcttggcacttcttttgctgtactccagaggttttgataacttgtatcattattatcatttgattcagataatttttccatcttgatttcattattaacccagataccatgtagaaacagattatttaatttccatgtatctgtgtagttttgagggttccttttgcccccaagaactttaaaaatcattttcttaagccctcttaagtctgccttcaagcttttattttgagtgtccgggtttcctctcatcatttctgaccttggcaacctttcattgctttcaaggatgttctctattgcagatgtgtattgtcttgtcaggtcagtgtttaaagaaaaaacaatatttcatcaatctgaatgctgttagcccaagcatacaccctctagtttgttaagttgttctgttattatttactcccttttgcatcacatattaaggtttctgaagggatttgagtttgtgaccccttcgttataaactatttcagggctaggcgcggtggctcatgcctgtaatcccagtactttgggaggccaagctggggggattgcttgagcccaggagttcaccagccctggcaacatatcgataccctgtctctgaggcaggaggattgcttgagcctgggagtttgaggctacagtgagctgtggtcatgctactgcacttcagcctgagtggcagagcgagaccctgtctcaaaaaattgaataaaataaaatatttcaacaggtgtttgatgtgctctccttgttttttttttttttttttttgtaaattatactgtagtctacctaagttgctgaggttctaagcctaggactcacctttaaatcctcttaatttcactctccacagtcattacatcagcaagtcccatttgactcattcccaccaccttcactgctgttattgtagcctaagccactttgctctccttagacaacaggaactttctcactcatctctctgcttctgtcttgcctctcctctgttgattctgtacacaacagcccaagtgagtgatctttttaaaacataaatcatatcacaccgtttccccacaaaatactatccagtgtctcttcactattgactaactgtccatacaaaaacatacaaaagtccatattcatagaatttttgaggtgtgtaatggggattatgggaactacaagatgagatttgggtggggacagtcaaaccatattagtatagaaagaattagtatagaaagaactgatctatgtggttgatgcctattgtagtccttacatcctgtaattcctgcattagaattcagtggaattattgttaccattatattattgctatggtcattatttattgttttttattgcctttgtattaaaggaggtgcttgttatggcatgtcatatattattatattatgagaacacttcagagcttcaggttagatacccaatttttgacttgatctctgtactcagttatttcacaagccctacaacctcaaaactggagttcatggttttcctctaaccaaacccatgacttccaaaccttatgtctcctccagtgttccctttctcagactggcccctatctcagaaaccagaaacctaatgtttttctttttacccctctctcctcatagataccctctctaccatgtgtcatcagttacctaatcaagcccagtcagtttacccccaacctttaagtaaaattaagtaactgccccccattattaccaccaaaattatttcccttggactactgaagtaaccttgaaaattgcattcttgtaactgctgtttccttgctctagttcattctccatgcagtggtcagaattatctttataaaatatcagccaggtgtgatggctcatgcctgtaatctccgcattttaggaggctgaggcgggaggattacttgagcccaggagttcaagactagcccaggcaaaatactgggaccccatctctacaaaagatagaagaaaaaatagctgggcatgttggtacacacctgtggtcctagctgcttaggaggctgaggtggaaggaacacttgaactcaagaggtcgaggctgcagtgagctgtgattgcaccactgcactccagccaaggtgacagagtgagatcctgtctcaaaaaaaaaaactaaaaaataaaacacaaatctgattatatcatattgctgcttaaaacctggccctggcttgccattgctatggggataaagaccaaaaacccttggtctggcctgtaaggcctgtctgcctgactcctgcctgcctcatttcacaccagattcccctgttctttctgcatccctcttaccttttacataagggagttgatcatggaatactcttccttttagaatcttcgtacatgtgttctctctgcatgagatgcatctaactgcccttcctcctacatgccaacattcacattgattttttgaaagtcaacctgaatgttgcttactcagaatatcttcctcacatacgtcacaaagtcagaaccccagattatgggtcatctttgtactcttaactttcccagtaaagcatttatacctatagtgattaaatgattaattttgtggtctataccatatgtttcctttgatagaatataagctctgtgaacccaggaatgttgtcttagccatgagtagattcatagtgttttgtacaagttaaacatcaggaggaaatacacacatattgacacacaccgttctaatgagagaatgggagaaattcctacgtaagaaagaagcatgttttggtagtttttcctggcatcgttaagtatattattgttttgcttctttttttttttttttttttttttttgagacggggtctgactctctcgccaggctggaatgcagtggcgcgatctcggctcactgcaacctccaccccccgagttcaagcaattctcctgcctcagcctcccgagtagctgagattataggtgcctgccactgtgtccagcttatttttgtatttttagtggagatggggtttcaccatcttggccaggctggtcttgaactcttaacgtcgtgatccacccgccttggcctcccaaagtgctgggattagaggcgtgagccaccttgcctggcctttgttttgcttcttagccttcatagtgtttctcagtggaggctatacttgtttatccacagattttatatatgttaaatacatgaggtatttatacaggattattttaaagtcattgaatgggattcttatgatgacagtaaatcaactctttgcttatatttatgtaactatttgaagtctctggctttctctaaatgaattacaatacaggtcagcaaatattttctctagtgggccagatagtaaatattttagactttgcagccatattgtctcttttagcactcttcgattctgccattgtggcacaaaagcagttatagaaaatatgtagatagatgggtgtgtctcttccaataacatgttatttatgggcaccaaaatttgaattttatataattttcatgtgtcaagaaatactgtttgtctcttgttttccccaccaccccgccaacatttgaaattgtagaaacttaccttgtgggcagtacaaaatcaggtatatggccccaggattgtagttgttgacccttgtctataaccacctctgtacttaagtattctgtcatttatgtgattaaaatagaagacaaaagaaggtgaccccttttttgtgcaaaacaatgtgcctatgtaaagaaaaatgaattttgaattgtgcaaagaagtattaaagaacaaatttagattctgttgcctgtttacttaataggtaaacattatgtttttaaaaaatgaattcctccagtatgtgggcctaagcttaccatgatctcttgaggtcaatactttaaatttagtatataaatctttgagtaggttctaaaggagaatttataaagaatttttctcaaacactatcaggaatctaatatcttgccctcccttaaactcttttcactctagtttataagtgagaaacactttattttttttccttgtaccaatcagaaccttgattttgaaaaatttgacaggggagtttaccatttacataattgatgagctgttgcaacagtgtgcgaagacttgctaaatgaccctgaccttttaactctgacttccttagcatctttattgagttattttatattttggtagtgattgcctttccagaatgattttataagttttcattcccaccaatagtgaaagtgactaaaatgcagtggctttgaaattccttaaatatattcttaactgtctagcttaatttcttcatatgtatcaaaatgcatacagcattggatgtgatgttttgtgtcacagtacttggtatgtttcctgatttttctgacttattgattagtaaaatagttcatcattattttttctttgggaagataaggaactcctttgttatagactgtttgtttgtttgtttgtttgtttgcttgttttcgagacggagccttgctcttgttgcctaggctggagtgcagtggcgcgacctcggctcactgcaacctccacctcctgggttcaagcaattctcctgcctcagcctcccgaatagctggaattaacaggcacctgccaccactcctggctaatttttgtatttttggtagagacggggtttcatcatgttggccaggctgatctcgaactcttgacctctggtgatctgtctgccttggcctcccagagtgctgggattacaggcatgagccacaacacctggcctggttgagttacttctttaggagagaagagatgaaattggaggttaaactacaatttgacaagattatcctaaattaaaactaattctgaacaagactaaagtattgaattctggcggggcgcagtggcttacgtctgtaatcccagcactttgggatgtcaaggtaggcggatcacaaggtcaggagatcaagaccaccctggctaacatggtgaaaccctgtctctactaaaatacaaaaaattagtttgggtgtggtggcgcacacctgtagccccagctactcaggaggctgaggcaggggaatcacttgaacctgggaggcagaggtttcagtaagccaaggttgtgccactgcactcctgcctggtgacagagcaagactccgtctcaaaaaaaaaaaaaaaaaaagtgttgaattatatgttaatacgttatgattttattagtactgttggaggcttataaaatgataaagttgaaggagactgtaggatctttagttctacatttcatagctgtgagacctgagaagtactttcccagcatttgtggctatatacctatgtactggatacttggatttcaaattgtaacttaacaaacatattatctcactcctttcttacgactctttatacatagattctttctaggactttgttattttaaaatgtccatcttttatatgattgaaggtattttagatggaaaaatcattgactctagtagccttttactgtcttaaacatcttactttttctttgaatgtcatttttgtgacctacttttagcacttaccctgcccccccctttttatttggttattaatttcccaggcaattggagtagttaatatttttttccttttaggtaaatgatacaatttacaaatctttttttcctgggaaatgtggttaactgcttaatgaatgctaaataacatggagtgtttcctttgttccagatctcttttcagcctatagaactgaaaaatcggtatttttagttttagctgtgaacctttctattgaatttcagtaaggcatttttttcccactgaaactaaggattcagagtaattacagcagtgctattttctttatttgtccccgtgaaaacagtaactctccatttttttatatagaaatataattttagtagtcttcatttagaattgtggaatatgaacattttcttggtctaatgaataggtgaaatgatagcattttccctatttctgtctattattctatataagccttatatagtcaaatataaatttcatgttgtacattctgaaaagcatagttacttaaatgatatctatcatcctaaattgtatgtgtccatttcattttatattcccattttaagtgacacttactgacttgaaaatattttttatcaactctcactttttaagtgtctctgtttgcccacactcacccacatcttaatctccccatccctactccccagaaaaaaaaaaagtaaaaagaaaaatagaattgtgcagggagctctactctgatagcactgatagaattcgttgtaggatattatagataccaaaaaaattgaccttagatctccgaggagagacactgctttgtttcgtggcttgtgtaacctcaaatcctgaatgaatacctgcctagaatgtgatgtagaatgaatgttcatgtcctctcttgtgtaattctgttccctctaagttgagcaatagctgtgatttttctcaacctatcctgcttggattttgatggccatttttcattctaatacaatgcctgagtgaaaatgagtttccttatatctctgaaaaacccaatattttagtcaagatttctgattctgaaaataccatatttgacccagaacctgtagacattttatggtaaaattgctttattacatactttcaaagttgcatttcacctgtatgattacatggataagtagcaggaatcatttttcaatattgttttcttgaatctgtaaccgcttttcagcctcattacattttctgtttgtcctgctttgctaggtaatttatacatgaagttgaccaaatccttcttggtctttgggagggtgttaaattccttctcagatgtgtcgtctattgttaggttgacaagtcggcttgtccttagaaggaacactggggaataaattgtgctaatgattgttgtgctgtcttctcttgctgtggttaatagtaatcatttcttttccttcctctttttctgctgcctctttctttatcttccctgacttcccatgtacttttgaatttattaaattggactatatattttttccttgctttccttttttaattttgtgatctcctgtgctctactgtcttccctacttgcttgggttccatgttgctagtttttatgttcgcacgctcattatcacccttttttgtacttcaaatcccagcagctgcccagccaggtccccgagcacagccctgtggtttatgggactgtggagagcgctcatcttgctgccagcacccctgtcactgcagctagcgaccagaagcaaggtttgtgtatgactgttttcctccctcttatctttagtctcttttttattaattacattgccgtcagcattcaagagtaagagtacagcatccaaggattatttagacacccacctttaaacaaagctttgaggcagaaaattaaagtattctgcctctaggaaactaaagtagggatgattggtaaaattatttcatacatttgtttaatctctcactgttagtatctgtatacagtttaaaggttagctgccttaaactgccctttaaaacaaggtgggaagtggagggagaaatcctagcatatattactttacaagaacaatacagtttagcttatatattcagcatgtccctaggtatcttgctattttaaaaaagaaaaaaagataaaacatttcttcttacaagtttgggcttctatagccacatttggagatggagccaagttccaatcccggctccatcatgcactagttatttggtcttgattgagccactgaccttgtgtgtctcagtttcttcactgatagaatggaataaagacctatgtgcttgacaggattactgtgggaacatgcctatcacaggaaaagtgcttagtaaattatagtcattaatgctgtattaaggaatagtacactaaggtctctgctcctattgaacttgaacatgaaggtgccaaatgtttgttgaaataaatactgtgcctttgggaatataatagaaaacttaaaggaaatctaataccagaaagtgggatatcatagtctttctttcctgcctagttgtattttaacttgacctttgctaaaattgagagagaattctaaacatagttcggggaagcaagtaactttgaccctgctttatgtttcagatttctaaaaatgattggatatcaatatggaagccatgtaccttcttactttcttgaattatttattcctccaaactatttgtttattctatagctctatagttagtatatagattttctaaaaattattctttttttttttttttttttttgagacagagtcttgactcactgcaacctcctcctcctgggctcaagctattctcctgcctcagccgcccgagtagctgggattacaggcatgcaccaccatgcccagctaatttttgtatttttagtatagacggggtttcaccatgttggccaggctgctctcaaattcctgacctcaaatgatctgcctgcctcagcctcccaaagtgctgggattgcaggcctgaggcaccatgcccggactaaaaattatcctttaaaaaatatttaggaatggcccataaaatagatatatttaatattaaaggtttttgggtagactgcaagttagtcaatcacatttataaactttctgaaagatgtacttctaatacatgatttcattgatttttacatcaaacaaagattatgatatgtgtttttagtatagaaatttcattttccccctgagtattgagaagcctgatactcttgaacagacaggtcctatactgtatttgttatataagatagttttaaaccaaaagatagttagtgatccctaatgtggcatgcttcaaaaaactgcactgtcaagaacttctttcagcaacattttgagttaaaggagaactcctgcatgcttcaagcgaattctttaaatagtaaagccatttaccttgcgaaattacagactgtagaccaaatgtggaagtcgacttgctaccttcaatgataaagtcgttttgagtcaaaattcggaatgtttttaatcttagtggagaataattctcagagtatttcccttcaaaacttcattgcactttcgcaaatgtgtaatctttttgctggttagaattatgctaagcatattgaatacttcccatgcaaagaggccttaaaatatatcttctgtgcagactttctctgtagctgtgccaggatttttaaaaaatttatcacatactttgatgatgatagttctgtccttcctgaagacagtattattgcgtttgccattattttgtgaaaaataatgttaaaatttttagattatgagatccctgcattttgtcatatttaggcccagatttccagacaaggaatgcagacttgatttcctctcaggtttttgtttttgttttgcttagtggaaatttgaataacaacatcaacatatctaactggtgtataatataggcttaattggaaagtattcaggttaccttgatgaaaagaaaaacttgtagtattttaagtgcatttcagaggttataactaatgctctggaattactgttatcttccttttagtaccaactattcaccagaaaactaactctctttctttgtttctctgtttctgccttactccctttctctctccctttctctttctttctttctttctcttgctctctcgttctttctttcatctctctctctctcttttttctttcttggctagtcaaacagtaacatttctaatttcttccatagcctgccgatagctaaaatattactgttttcagagttttttttttttaaccaaatttatgtaatgttagaaagggctcactatttttttcagagaaaatggttttttttctttacactgaggatttttttttcttttttcttctattttgagacagggtttcgttctatcacccaggatggagtgcagtgacacgatcatggctcactgcagcctccacctcccaggctcaagcagtcctctcacttcagcctcctgagtagctggagctacaggcatgaaccaccatgaccagctaatttttgtatttctagaggcgaggttttgccatgttgtgtaggctggtctcaaactcctgagctcaagcgacctgcctgctacggcctgccaaggtgctgggattacgggagctacctcagccagccaaggagtttttaaaaatttccttcttcactgtagattccttttgaaattagcatataaaaactgacttttctcaaagattgttatattactcccagaaacaacagtctctacattttgcagattgtttttttctttctcaatagaaatgtctttactgagagtttgtactcagttacacaatctcatgttaactctaaagtctccctcctgcttgattgacttaagtacttctgtttccataagcctcccctttcctccaaaaagttggaagaatgtgggatttgaaatcattctcagacttgagcacttgctacttatatgactttgggcctgtgactgatctctaaaaccctcagtttcctcatatgtaaaataggcaaataatttctaccccaacaatcgtggttgtgagaattaaaagggacaatgtatgtatggtatttgacccagttcctggcacataataagtgcttaacaaatgttagctgccattattaagcttccggtttctcagagtttttgacatgaagagctagaatatttacatgaaggccaaggttccagacaaatctaccattttacatttgtttggcaccttatgaagacatagggaatacttcacattggtttgtagagagaacaactgttgaatgaattaaaatttttgcttggtattgatagtacacagctgaaatgattgctatttactgagtgagaaagaacattaaatccattgtactgaggatatggtatggataattaaaggagttagttggtgccttagtcttaatcttagtgcctgttgaaagcacctagtgtgttcagtgaatggtattctgtttgtaattcaaccattcatagcagtgttgttcatttgggactctgctggcatttaggacctattctttgtcaagtgagactgtacctcaaattgcaggatgctcagcattcctctctctgcttattaaatgacaatagcatcttctcagtcattgagagacttgtgacaaccaaaagacaacccagtcttggtcattgattccaccaccatatgagaataaaagggagcaattttattcttcttataaatttggcactctttatggaaactacagctaagcaaaatgaaaaagtatgtgtctgattactcagagccattattaataagctgactttcccctatgcacatatgttagtactaagcatttttttaagttaccaaattgggttctacatagagttttgtgccccactaaaaacaaacaaacaaacaaacaaattcttgccagatgcagtggctcacgcctgtaatctaagcactttgggaggacgaggcaggaggattgcttacgaggcaggaggattgcttgagctcaagaattcaagaccagctgagtaacatagcgataccctgtctctacaaaaaataaaaatattagccaggtatggtggctcgtacatgtggtctcagatacttgggaggctgaggtaggaggattgcttgagcctgggaggtggaggtcacggtgagctgagatcacaccagtgcactccagcctaggcgacagagcaagactgtgtctcagaaacagaacaaaacatatcttttattacaaacaactttccatatcattaaatactcttttaaaaacatattttaaatattgcatagtatgccattatatgcccagattatcatttctttaataaatctctattgttgaacatttagttgatttccttttttctccttttttcttgtattataaatagtgttgccttaaatattctagacatctatctttgctaaccctttcatgattattagaaaaattcttaaagctggaattcctgcaaattcctaaagatggccaaactttttataatagaagtctttagagggataaaataagtgtttttttttttaatttagctctactgtgtttttagctttctgcattttcagctttctgtattaaagctttaattagtgggttaaaggacttttattttagaatgaagaactcacaatttgttttgttttgttttgttttgtttgagatagagtctcactccactgtatcacccaggctgaagtacagtggtgcgatgacagctccctgcagcctcaacctccagggctcaggtggtcctctcaccttggcctcctgagtacctgggaccacgaatgcacaccaccatgcccagcttgtagaaatgaggtcttgtagtttgagacctcctgggctcaagtgatcctcccccttggcctcccaaagtgctgggatttacaggcatgagctcaccatgcctggcctaagtttttcaatactagatttttctgaagtgtgtatagaagtttatcaatcataggtctacttttgtttgattttttactatcagaaattgtttcccaacattaataattgaattgacatactcttattagatatttaatgtgagaatcaatttctctttttctctctctctctgtccccccaccccgctccccctctctccttctccccacttttcttttccctttttcattttgagacagcgtcttgctctattgcccaggttggagtgcagtggcatgatcacagcttgctgcagcctcgacctcctgggctcaaacgatccttccatcttggcctcccgagtagctgggtctacaggtctgcgccacctcacctggctaatcttttaattttttgtagacaaaaggtctcactatgttgccgaggcttatcgcaaattcctaggctcaagagatcctcccgtctcagcctcctaaagtgctaggattacagatgcgagccatcacaccctgccctatttttaaatttactgcatctaggtttcagtcagtggtcataaagggtgttagtctgataagctttcacagtggtattatgtaatctgggtgacttatttactccagtgagctggaaattattttcatcaaagatattttgataaatacatatttgttatatatggtgtgttccatctagaacgaacatacacacacacacacacacacacacacacacacacacacacacacacacacacacacacacacacacaaaaaaaataaagacaagttttcctgaaatatttttgtctgttgccctgtcaacttagtctgagggatttggcaatgagagcctattgattctatttcatcactgcagtaactaagaaaagtccaattttagaagcaccagcttctgtgcctataaataaaagtatattttaaggctaataagtgtcattacagtgaatgaattaataatatcttaatggtaatatttaatacctatttatctgataaactgcatatttgctttcacataattacaatttattgtaaagactcactttcattgatgtataaaaaattctgttggagaaagtagtctcagtttaggttgtcttttaatagtgcttgaatcttttgttgtcatttgataaacatactcatgagtatatgtttttccatggagcctgtttattgtgctaaggaagcacaaggctggaagccagtctaaatctcctttggtttcctccactcagggatgaatcacatatcaatttacctggaatttattaataaaaatgtggaaattattgttaattattgttccttgtgtttttctggtacccgcattatgatgaccagcttctcttctctctccgtctcattctctctatatatacacagatgcatttttgtatattatatcaaactatttcatactatgaaacactagtattttcatactatatgtatattgttttctttttcattggatttattcgtgtattaactttgttttctccttaattgttttacatgtaaagacacaagatatattttgttttttttgttttgtttagagacaggatcttgttcagttgcccaggctggagtgcagtgatgcattcgtagctcaatgcaacctcaaactcctgggctcaagtgatcctcccacctcagccttttgagtagttgggattacaggcatgtgccaccaagcccagcaatttccatttttataccttacattatttctggttatatacttccattgagaattgaagggtaaattaatttagaaactgatttttatcagttactgagaatagtttgatttcactgatagtaaatttcattaaataaaatgtgatgctttatcttgagtttttatacaagtaatactttttaaaataaaaattatctccccaaatacaaaaatatatagaataaaaaataacatcagtccctttataataatttaatttttaattgtttgcccttgtactgttttgccactgtaatatatccttggaaaaaaagttttttagggaacgagaagtggtagaaatgaaggttttcctaccttaaagaaaagcctcactcttaaaccaagaatggtttagcctcagttttggtgagcttttcagttgtattcttgatatataattttttggtgaatagattccttctcttactccaaaacagactttatgtattggataccaagtaaatagtaggtttaagtaaaaaaagaaaagagacaatgtttttggcataccagaataagtctaatatattggtctctgttctgttacctgtaatttagggtaagacattgaaagaattggcccaaggcaatatgtagtctctgatccaagaattattcttaaaacttatttttttttccccagaggagaagccaaaaccagatccagtgttaaagtctccttccccagtccttaggctagtcctcagtggagagaagaaagaacaagaaggccagacatctgaaactactgcaatagtatccatagcagagcttcctctgcctccatcacctaccactgtttcttctgttgctcgaagtacaattgcagcccccacctcttctgctcttagtagccaaccaatattcaccactgctatagatgacagatgtgaactctcatccccaagagaagacacaattcctatacccagcctcacatcttgcacagaaacatcagaccctttaccaacaaatgaaaatgatgatgatatatgcaagaaaccctgtagtgtagcacctaatgatattccactggtttctagtactaacctaattaatgaaataaatggagttagcgaaaaattatcagccacggagagcattgtggaaatagtaaaacaggaagtattgccattgactcttgaattggagattctcgaaaatcccccagaagaaatgaaactggagtgtatcccagctcccatcaccccttccacagttccttcctttcctccaactcctccaactcctccagcttctcctcctcacactccagtcattgttcctgctgctgccactactgttagttctccgagtgctgccatcacagtccagagagtcctagaggaggacgagagcataagaacttgccttagtgaagatgcaaaagagattcagaacaaaatagaggtagaagcagatgggcaaacagaagagattttggattctcaaaacttaaattcaagaaggagccctgtcccaggtaagccattctgccattaatctcgtgcttgctgaacatgaagaagaggcagtgtttgagttattttttaattggctactttccttgacttccagaaacatcgaatgaatgctgaaattcctagtctggtttcttcagtggtgtgtttgtgttttagtacaacctgcaaaagagttactccattgtctaaaaatgcaaatgagaatttccaaatatacaaaatgcctccaaggtatatgtcacgaaacatgttgggttttgttgttgttgttgttgctattgcctcattcatatgaattggtttctcaatgcttaattttgctgctttggggctagaaaacaaaaaaccaggatggtctatagtccctaattctgtcttcctagaattttaaaacccagtcaatcctaaaggaactcttctatgcatgaccagtttttaaatcttggatgtaggaagatagcaatcagaacatcaaaggtttataactatttttgaaaatataatgctgttgttgattcacttgcaggtaagcttaacgttctctcactttgccttttgaaacagttttattttttgtgtacatttttacatggtcattaatatccttggagtattatattcttcccagttcaaattatttctttttaatgtagcatcacctgggaccttaggaactaaccattgggttattgtaagtttaatcaaaagttatctgaggcttatcagctattctaggataagttagcccataggaatattgaagttttggctttgaacaattcagcacagcctatcttctgcaacattgccctatgctatataatttcctttctctgtgcctgtcagattaagtaatgcgtatgtaaattgggctttttgataaatgagtgctcctccagcagttgatccttgacatgcagtgaataggttttggtcaccatcatcctcagtatttttgtctattttgaggtgtataataaggaaatttgacaaacccaaaagctgatccctacttttgagatgtggcttttctacccagctcagttcttgagacaatttcctcatcagtgtctgtaagaggtgtctggccttttggaactgcagaacatcttgtagaacaccatgagccagcacaggaaagaaaacaatgcaaggcaattggaacagtgagaaatttttcataaatctttgtaaattacctgtttcctcaactatctggcttccattgacatcagtattcatagtgccatcactgttttaggaaacttgttccttggtggagagatgaccttagaccttgttttgtcagttaccctttagaaaaacagccttggggccgggtgcagtggctcatgcctgtaatccctgcactttgggaggccgaggtaggtggattgcctgagctcaggagttcgagaccagccttggcaacacagtgaaaccccatctccactgacatacaaaaaaaatagccaggcatggcagtgtgggcctgtagtcccagctactcgggaggctgaggcaggagaattgcttgaacctgggaggcagaggttgcagtgagccaagatcgtgccgccacactccagcctgggcaacagatcgagactccatctcaaaaaaaaaaaaaaaaaaaaaaaaactaaacaacttggtgttggtgtggctgtaggtaaatgccctccgaagaaacacgtgtttgttggagaacagtaatttgtttgacacttcaatgttcattttcatttgtagtgatacgatagttacaaaaatgagagaaactaatgaacaaaaatgtttttaaaatgtaaaagcaaagaaaaacaaaacaatcataggaaatataagttgaagatacaaaccatacctcagaattgaaataagtgtaaagtgaaaagaccatgcatcaaaatcatacttcactcatttctgacatatattctttttttaaacatcagtttgccacttagatgacctgatattgcaagacagtgcccagggatggatgggcaaacagaattttggtttaaataatgttcataccatggtacatttgtttgaaatgcagatgctctcaatattagtattgtgaacaccagcaccttaatcaaagagtatagactcttcagtggtaatccagagagcacttagaaaagaaagaactgtttttttaatgacttggaataacagaggtttgtgatgttgggaggtaaagtttcttggcatttttctagtctcctgattttttaacctatgtgtttaagggaattacaagttttataatttccttgtacatcttaatagtcttcaaaatccaacagtaaatgaacttcaagaacccctgcaactctagctttttttttttttttttttaattttttttaagatggagtctcgctccatcgcccgggctggagtgcagtggtgcaatctcggctcactgcaacctctggctcccaggttcaagcaattctcctgcctcagcctcctgagtagctgggattataggcgtgtgccaccacgcctggcttatttttgtatttttagtagagacggggtttcaccttgttggtcaggctggtctcgaactactgaccttgtgatccgcccgcctcagcctcccaaagtgctgggattacaggcatgagccaccacacctggccagcagtttgtaaattataaagcctcagaagcatttctgacccattcatttctgtccgaatattttttaatggttttgtcacaaaagttaacaatgaaaattaaaattacctccagtctttaagtatatccacctgacgtggtcatatgcttaatgactataatttatttgcacttattcacataatattcacttattataccttgtttactttgagaagttagtaaatcataacagccgtttactttgagaagttaataaattgtaacaccaaaacagtctggtttgcctatgagtcttttggtggtgacttttgagaatagtttttacttgtctctgcctgaggatgaaacacctcaaagctggcttcagaaacctgatacataaataacatatcagttggtatagagatagttggttaaagcagtaaagttataacataagggatatggtatcttttagttctgctgcaaaacattttcttgtaactattctagatcatatttctgagtgaataaaaatgcatcagttgaggccgggcgcggtggctcatgcctgtaatcccagcactttgggaggctgaggagggtggatcacctgaggtcacgagtttgggaccagcctggccaacatggtgaaaccccgtatctactaaaaatacaaaaattacccaggagtggtgatgcgcctgtaatcccagctattctggaggctgaggtgggagaattgcttgaacttgggagatggaggctgcagtgatccaacatcgcgccacttcactccagcctaggcaactgagcaagaccccatcttaaaaaaaaaaagaaagcatcagttgttttcggattgaagaacaagctctgtaaaattagaatttggtgtgtatatatcttcagtgtactctgaaaagcctcagttattggccacacttttaatatcaccgtcactttagtaattaaatgcataaaactagatattaattggatgatatattaaagtcttgggaatttttattgtttattctctgtatctggtgggaggaaaaaggagtgttttgaacttgtgggaaagcattccccattaatcatccaggagtttgttttctacaattttaggaatgtatatgatgtatagtatgtaacattaactttcccactttttaaaagaattgtgacttttttattttattatttttacctgtatcagatataaaaccattatttaaattttcttaggcagagggagatttctaatttttctatttattttgtttttttggctcttgcttatagtacatttttaatgtatattttgtaagtttgttttatgaacttatccagataaattttcctggatgtagattgatggcaagttattctaaagcagatttgtgtttactttatctgctgcatgtcttggggaaagcatttgctggaactaaatctgggtttaatgtttgttagaactaaatctgggtttaatgtcctaaagctacagttctatcccaaagcctaaggacagccataccgtatggcttggatactaattttcagggtaacagcaatcttctctccatccagttgaaacaacgtcctttctcatcatcactgtgttggttcagtggtttattccctctctctcttttttaagctatcttttcactgagcatgtcacccatttgggagtctcagagctttatgtgagcatctcagttccaggttcccactttgcagggatccaagatctctcttttcttatgggtgttaaaaatacaaattcattggttatagagactggcacacccttctacacccccaggaatgtaaggatggcatcagccactgacctgtagtttaccttatattctcgtaagctcagctaaggatgtagaagggtttccagattctgtagaatataacataggaagtttatttctcaaatggagatacgattatatgttttggtaatgttaacaaaatactgatccatgtagccaatcaagttgctgctttctcttttagtttagacttactgaagtgtaaagggagcatacttcagtgcaagaaaaatattttaataacaacccttgctttattctcaactgtgagagtattcagagtactttcaaagaaataaacatagcaaacataaaaccagagatataaaagtctatcagttttcctagattaaactaaaaatgactaatcttttaaataataaaatttattctaacctttgctcaacttacatattctaaaatatatttgaaatatctctggaagatttagtcgctggggccaaaagtagattgccaatggtttgagtatcctgttggcctaatcactatactactatgcatccttataatttagcttctacagaaacgtgttctggaaacatggaaacaggactccttacacattcctggttctttgtcatctaccaaaacaagcagagtgatccttaaagcaaggaccattggcttcagttttcagaggcttgagtctgagtgatccttagggataaataaaggttttctccaccttgtttgtaaactgtttccaacaaagctgcctaaaaggtatgtttctgccatcccattcctattttcttgtttccctccccagtaaactcttaggcattccttggaaaatactgatgctggtcaaattcttttatatactgcagaatgagcccagacacctgttagttgagcctgttggcaagtcccttacgtagttcttccttgcctctttatgtgggatagatttccccattttttacagtagttcatgtctttcatcatgagccctaaagtctcagtcattgggtattaacttagttctacatctttctgagtagttatactttgttcaaaatgtagctcccttttccccacatttagtaactaatcctcctccatgacaaaggactattgtactgacctgcttccagagaaggtaattcagtcagcctagagctgtgctccctcagtcttttaaagaaaacctctacaggaaaacctagtcttactataagttttccctttctctaatatccatcattaccttgcacacagttgccttgagaacttttcctgattgccttggaaaagataactttccatgttcctaacacaaagaaatgataaacacttgaggtgatggataccccaataaccctgatttggtcattacacattatgtgcttttatcaaaatatcacatgtaccccacaaatacgtatgactattatgtatccttaaaaatttagaattaaaaaataaaagcacaagtatgccaaaataaggaagataagtttagtaagactttattaagaaaaaagataattctctctactaatgcataaaaatgcccaaaatacatttccttcaatatatttcttttcttcattttctattactgtattaaaatacttggtaatttagtcacaatcataataaaaattattgtacatttttctgtttccaaaggctttcccaggcatttcaagcattattcttgtgatttgaacagttattcctggatatagttatttctgttttgctgatgacaaaaataagcctcagaatggtaaatcagctttctcaggctcacaggagaattacagccccttcctttatacgtcatgtttctattaatctttcagagatggtatgtcaatacaaaattacctcaggatttgacagttatactttatgcttgtgacctaggttcatagtgaaacatgaaagcccacctgtttgaaccacagtagttactgaaggcctactgcgtgtcagtcattgttccatgcacttgagatttatgaatgagtaatacaaagatccctgccctagtgatgtattaggaagttttaagtgctgtaaaaataataaaacagggtgaggaatgcaaaggggcagcaggttgtagtatttaaataatatgatcagagtcataggcctcagtaggaggtaagatttgagcaaagacgagggggattatttgagctaccctgtacaaaatctgtgattttcctctttttccttttgaaaaacatacctatcaaaacccttgaatcagtactataactcctactttgtctattaaactccagtaggcagagcactactggagaagatcacaccacttacagtggtgtgaatgcaactacaaattcacactgtccatcccaaccattatttttatggtttttctgttgaaaatcctttactctgcccagtgctactcacctgcagcacatgacctcgtctccttctttattgagaacattgaggacactgggtacgccttttttttaactttctgcccccttacaaacctggctatattgaaaccttcatcagactctcttagttgtctcttacagtctcgtatgtattcactgcctctctaccaccttcttattgtctgtctcatgccagagacgctctctgagtcccatataaccatttagctgccacttaaatggtatctttttcttctgacccaaactgtttaagaatagtctaccatgtcttctactattcttttcactattcaactaacatatagtctgatttatgctcctaatatgctagtggaatcttcctcagcagggtcatcagtagacacacatttatcttcctagtctttttgcctcattttaccactattggtctctttctctctctcttttaagttaggtcgagtgtaatttatatgcagtaaaattcacccttgttagctagcattcatttctgtgagttttgactagcacagaaagccatgtaatcacaccagtcaaaatataaaacagttccatcagctgggcgtagtggctcatgcctgtaatccccacattttgggaggccaaagtaggatttccaaatttttatctctgtcccaactcctcctctaaacttcaatcttaaatttccaattatctgacaaatatctccacttgcagagtcatctcaaattcagtacatccaatactaaaccagtcacctattcctctaaacctattctttcatctcaggttatacactggctttaattaaactaaaaccctgaagccactgttgacgaacctcccttttgagtccccttttttcccatccagtcatttcacaaggtgccctgtttttgtttttgtttttccccccacaagatagagtctcactctgttgcccaggctggagtgcggtggtgtgatctcagctcactgcaaccttccgcctcccaggttcaagtgattctcctccctcagccccctgagtagctgggattacaggtgcgcaccaccacgcccggataatttttgtatttttagtagagacaggatttcaccatgtttgtcaggctgatctcaaactcctgaccttgtgatccacccggctcagcctcccaaagtgctgggattacaggtgtgagccaccacgcctggccggtgccctggttttatctaatgtatttgtgacatttgttccctcctctccatttccttcttcccctgccttatccctgcacttaggtgtggatgcttgtcatttccttggtcccagttttgcccccacttgaaattgttctccaccaagtggccgaaatcatcttttaaaaatacagatctagctttgtcactcctctttcacgtctttttaagctcttcaggatgctgtgaaggattgggggaaatatcctgcaagatgaactctaaacttctcaagttttaccaccaggtcttctggtatccatatcctctcatacctctgcatcgtcagctacagtaatccaccagtgttctagaagcctggagattatttcaaaagcgccatatagtaggagtcttctgagtatacgggcatacctcattttattgcacttctctttattgtgctttcactgatacggttttttttacaaattgaaggtttgtggtaactctgtgttgagaaagcctgttaatgccattttccaacagcatgtgctcacttcctgtctctgtcacattttgataattctcacagtatttcagacctttcattattataggtgttatagtgatctgtgatcagtgatctttgatgttactgttgtaattgttttggggcaccacaaaccatgtaagacggccaacttgatcgagaaatatgtatgttctgactgctccaccaaccggcagttcttccatctctctccctccctcttcttgggccttcttatttcctgagatacaacaatattgaaattagggtattaataaccctgcagtgacttctaagtgttcaagtgaaaggaagagtcatacgtctcccgcttgaaattaaaagctagaaatgattaagcttagtgaggaatatgtatcgaaagctgagacagagtgaaagctaggccccttgagacagtaaagttgtgaatgcaaaggaaaagttcttgaaggaagtttaaagtgctactccagtgatcacacaaatgatacaaaagcaaaacagcctttttgctgacatggagaaagtttcagtggtctggatagatcaaaccagccacaacattcccttaagtcaaagcctcatccaaaacagtgccctaagtctcttcagttctgtgaagactgagtgaggtgaggaagctgcagaagaaaagtttgaagctagcagagcttggctcatgagattgaggaaagatgtcatcataacgtaaaagtgcaaggtagaagcagcaagtggtgatagagaagccacaggaagttatccagatgatctagctaagataattgatgatagtggctaccctaaattacacattttcaatatttgttgaaaaccaacagatactgatattgtagatgaaaccgccttatgttagaagaaaccatctacctactttctttttttttttttaagacagagtcttgctctgtctccagcctggagtgcagtggcaccatcttggctcactgcaacctccgcctcccgggttcaagcgattcttctgcctcagcctcctgagtagctggaactacagatgtgcatcaccacacccagctaatttttgtatttttagtagagacagggtttcaccatgttggccaggatggtctcaatctcttgaccgcatgatctgcccaccttggcctcccaaaatgctgggattataggagtgagccactgcgcctggccccatccagcactttcacagtgaaagagaaggggagaagtcaatacctggcattaaagctacaaaagacaggctgactctcattaggggcttatgcagccggtgacttctgtttgaagccagtgctcatttaccatatggaaagtcctaaggcccttaagaattctgctaaatctattcttcctatgctctataaatggagccacaaagcctggatgatgacacatctgtttgcagtgtggcttaccgactcttataagcctactgtagagacctactgcccagatagcaagattcctttcaaaatactactgcacattggcaacacacctagtaacctgagatcaaagagtaattttgactttcaagccttgttatttaataagtacattttgtatgtctatagctgccatagatagtgattcctgtgatggatctgggcaaactaaaaacctcctggaaatctgatttgttcgtggcatttgttccttcctcttcatttccttcttctgccttagttagccctgcacttatgtgtggatgcttgtcatttccctggctccagttttgcccctacttcaaatttattctccaccaaatagccaaaataatttcagcattctagatgccattaaaaacatttgtgggtgcagtggcgcacgcctgtagtcccagctactcaagaggctgaagtgggatgatcatttgagctcagaacttcaaagttcatctgcacaaaagaggagacacctcagcaagattcctgtctcttaaaaaaaaaattgtaattcatgggacaaggaggttaatatatcaacattaataagcatttggaagaagttgattctaaccttcatggacaactttgaggggctcaagacttcagtagaagaagtaagtgcagatgtgatggaaatagcaaaataactagaattagaagtggagcctggctaggcatggtggcatgtgcctataatctcagcatttgggaggctgaggcaggaggattgcttgaggccaggagcttgagactagcctgggcaacatagtgagaccccatctctaagaaaacaaaaacatagaactaaagcctgaaaatgtgactcagttactgcaatctcatgataaaacttgaatggataaggagttgcttcttcatgggtaagcaaagaaaatggtttcttgagttggaatctattcctgttgaggatactgtgaacattatagacatgacaacaaaggatttagaatgttacataaacttagttgataaaacagcggaagggtatgagaggattgggtaaaatgctatcaaatagtatcacatgatacagagaaatcattcatgaaaggagcagtcaagtgttggagcaaacttcattgttgtcttattttaagaaattgccacagccactctcatgcctcagcaaccaccatcctgatgagggcagcagccatcatcatcaaggtaagaacctccaccaacaaaaagattacaccttgctgagggctgagatgatcattagtattttttagcaataaagtattatttaattcagataatatgcattatttttagacataatgctatttcacacttaatagactacagtttagtagaaacataacttttatacgcactgggaaaccaaaaatttgtgactcgctttattgcaatattaacttcattgccatgatctggaaacaaacccacaatatcttcaaagtatgcctgtgcctacacaggcataggatctgaatgtagtttttcatgtatttgattaaacactggcagtaaaatttagtggtaagatcaaagcaacagcatcaaacactcctgagtcttaccctttttccttgtctatctctgtgaccatgggtgaatttcctaacctctttgagtctgtttctcatctagaaaaatgaagataataatagtatttacattatagaattgtaaagataaaatgtgatgtatgtaaagtacttagcacaacatctgacacatattaagcactctgaatgttaaataatattgataattctattttcagcttgtattaagagcccaaatgttccctttgaactctgctaatacacagaagagttggatatcatgatctttgccctgaggaatttatcttccaaagaaaggaagctcaaggagttgataccttctgaaatgtttttaataaaatctgggacatgagatggtggaaaatcccttaggataggccgtttgcatgtataatgttgattaaaagtttttgtacccattatgtcatttatcttcacagtagacacatctcaaggtgacctctgctgtgattggtaaaggagaaggcctccttagaacagtgaaggaaaatctgtagttgagttgaggatggtaataccatcattaacttcctgctttggcaggagtggaaaattaggaagaaaggcaaagaaagctcagaagaatgggggggaaaatgaatagggcagccataaagtggtaacaacccaaatcagtttatcaactgatgcatgaataaacaaaatgtgatatatacataccatgaaatatcggaccatgataaggaatgaaattcacatggtgtacaatggatgaaccttaaaaacattacgctaagtgaaaaaagtcacaaaagaccacattttatatgattccatttgtatgaaatgtcaggaataggcaaatccatagaagcagaaaataaattagtgctcaccaggggttggggagagaagagagtggggagacggtgctaatacataccgagcttctttctggggtgatgaaaatattctaaagttatatagtggtagtggtcacacaactgtggttataccacagaccattaaattgtatagttttaaaaggttaattttatgatacgtaaattatatgtcaacaaatattacatatatattttaaaaagaggggcctggcgtggtggctcacatctgtaatcccagcactttgggaggccgaggggcggatcacgaggtcaggagatcaagaccatcctggccaacatggtgaaacctgtctctactaaaaatagaaaaaaatagccaggcatggtggtgcacgcctatagtcccagctactcaggaggctgagacaggagaatctcttgaactcggaaggcggaggttgcagtgagccgagatcacaccactgcactccagcttggacaacagagtgagactgtctcaaataaaagaaaaatgagtatgatatggtggtgccaccagcatctatataaggatttgcttagggaagttatagcttagaaattgaggaagtaaatttcaacaagaacaccacaattgacagtatcggagatacaggagtatttgtgtacagccaaaaattatatcatcttttgacacatgctattgttgtataaataaatttatacaacaattacttatatagtgtatacataaaaactgtattgtttttattctgtcttattactttactactagttaaattttacctcagtttgagagggtgttctcagcttggtattgaatgtaccacctgtagagttcaagaccagcctgggcaacatatggagacctttcgtccctacaaaaaaataaaaaattagccaagcatggtggtgtgtgcttgtagtcccagctactctggagactgagatgggaggattgcttgagcctttgagattgaggccgcactgagccatgttcacaccactgctctccagcctgggtgacagagtaagaccctgtcaaaaaaacaaaacaaaaaacacctgtagcaatcattctagaggcattgctcgatgtcacagatatgaaatatccagttgggccggcaaagcagagtggttcttcatgatcagaacataagggatctgtgttttggaagtagtgattctgctgtttctttgtttgtaacttggtcccttatgtttttggcccagttcagccaccctctgtaactcttccttcaactctcctacctgagacccttctggatctgtctcttctttccagctatctaaccattcatttattcacccatctgttcaatccccatttcttttcactccatttcacagactgtcattatcttacacctcagctattacaactctgctttcagacttctctggaaaagtaaagtgcacattttccagaaaattctttcagagaaaatattgctgctggatgccagatatctgtctaagacctgtagaaatagtcgtttcaagggtacaagatccaggctcccagattagccttgaaactatcattatttcatcctagctttgcttaatattattttttaatctttttgcaaatctcccacacctgtttgatgagtgttaattcctgcattgtttccttgatgctgtcttcaacctagaccacattaaggaacctgctcaattcagttagctgggtgtggtgcctggcacctgtaatcccagctactcaggaggctgaggcaggagaattgcttgaacccaggaggcggatgttgcagtcagccgcaattgcaccagtgcactccagcctgggcaacagtgagactccacctcaaaaaaaaaaaaaaaaagtatttttttcaatttttcaatatgactctattcacaaggttttctattctgataattcctcgaacccttaaacatataattatgtcaatttaaaatactcgtagtactttatgcatattgatatgtgtacattttacctctccaacttcttttacatctccaggattagtaaagcttttatttttctgttatccccgagagcttttattaaatgtttatttactcatttctgcaaatgtatagatttgtgttgtttttgttgggtttttgttttgtcttgttttttagggatctgatagtaacaaatcaggtatatttaaaatcaccaccctggtaagaaaaaattgtagtttttttttttttttcttttcttttttctgagacagggtcttgctctgtcacccagactagagtgcagtggcataaacatggctcactgcagagttgacctcctggtctcagtcttcccacctcagccacctgagtagctggaaccacagatgcgtgacaccacacccagctaactttttgtagagatagagtctcgccatattgcccagctggtctttaactcctggcctcaagcagtcctcctgccttggccttccaaagtgctggggttacaggcatgagctaccatgcctggcctgttgattttaataatagtagctatcattgattaaatgcttgctatttattagacactgtggtcagttctttaaccctcacaacaactcttatccttactttacagaagaggagaatgaggcatggaggagatgatacttgctgaaggttatatagttaataagtggtagaatcagaattcaaatttcaactctacaatttatactcatagccacgtctttataatattgcctctcaaattaagctacatatcctgtaaataaatcttagacttcagcattcaaaagttaaaatcatttaaaatagttcttactaaaataagatatttttatatgaaagatgaatatatacataaagctacagctggataaacaggtagatgataacaagggatacaaagtcaaatgtgctcaccctgaataattaggaaaagcaaaaagcacagaatgtatctttcccagttcattagttaatacctctctccaagtttctgccaattccagaattcatgcatgtaacctcggaatcaccttaatacttaatgcagtgtttaagaaataaaagtaggctggctgctgtggctcacacgtataatcccagcactttgcaaggctgaggtgagaagatcacttgaggcccagagttcatgatcagccttggcaacagagagaccctttctctacaaaaaatttaaacattagccaggcttggtggcgcatgcctgtagtcgcagatactcaggaatctgggacagaaagattgcttgagcccaggagttcgaggctgcagtgaggtatgatggtgtcaccacactccaacttgggcagcatagcaagaccctgttgctaaaacgtatagaaataaaaatagaagtcattatttatgtgatagcattcaatgagatgattaatagcatccaaaaactattagggcttttgtaacataataccgttattaatagttgtcattcattcaacaggtatttattgagtcccagactgtcataatttatattagtttttaacagaattcaaataagatttgagtgatatttgaaatatttaaatcagtatacctgatcatgtagggaaaacctccctttgacatgatattatacactgatgttccataaattgtataaatcatgaataacccctaaaacatggcttttctgtatatcttacaaatgagttttactctaattttaaagccataccaaggtgtaaaacagtacgtatagtataaataaaggagaaacctgtatgcacattcacatgtataatgcacacatatatgtgcttgcatatacaccagtattttctgaggataagtaggaaatacttaataatgattttctctggggagagagacctaagagcaagatggggaagacaagactttttcagtttttcctcgtttgttgtgaaatctttttgttcatatgaattacttttgtcataattaaagccagaagcaagtttaattataaattttgcagtaatatgtgtcttaggtctcattcaaataataattttcgggtgggtgaggtggttcacacctgtaatcccagcactttgggaggccaaggtgggcagatcacctgaggtcaggagttcgagaccagcctggccaacatggtgaaaccccatctctactaaaaatatagaagttagccaggtgtggtagtgcacgtagttccagctacgcgggagactaaggcaggagaattgcttgaactggggaggctgagttggcagtaagccgacatcgtgccactgcatgcactccagcctgggcgaccagagtgagactccatctcaaaaaacaaaacaaaaagaacaattctctcatgatttatctgatatatgtgaaacatagattgtcaaatttcgaaaggtacctaccagtctgttttgaatgatttctaatattcctcaagatttgcagtgcctcacttcttattaatatcagttattcttcagtaatataaatgcggagaacagaaatatttcttaagaatttattttttgtatttctgataccatttgtatcatgatgttttcattagagtgcagaaaaattccagtttttttggatataagatttagtattcagttcaacaaacatatcagcagataaagttggaataaatagatgctgacagttctttaaatttcaataacagactctagatcttctctaaaatgtcatgttaaaatgagttataaattagaatacccttttgactgcctattctccatattttgggacacattagagaagatattcaaactggaaactgtcatggaaaaccaagaaatatgaatgacttaaccatgagtttttatgatgtgccaaaagagatgtgataaatccatgcttcactatgtttggtacaaaatccagaattaaattggttaatagattgatttcatttgttctggcaatgctaatttatatctaccatgtgacaggcccttttctgacctctagcaccacagagatgaatgaggcaaagtctttttccactgagaacttgataattttgtagagagacagataaatatatatatatatatatatatatagggatgggtaaggtgaagagaggagggaggaagtgatggtccctgttagagtgtattttttattattcatagtagctcccacatattaaggttaaagcaaatttctctgtgctttgcagtctggtaatgtagactcactgatggtcagatggaaagtagattttttttttccatctagagttatatattcgaggcagtgagctgtagcattttatttggagatgaaaagtgttgagtaggtgtaagggtaactgtattatagtctctttcctaattaaattacatatttgtgctgtagtgattgacttttttgcatctgtactagatttaccttgaattaaattgcagtcttttttgatgatggtagaagtggttcaaaagtgtcttattaaaatgcaaaagtgcctaaaacacagagcagtaaaaacagaggcctagaagatatgccagtggtctcattggagtcatctttgttctcagtgtcgacaattgcttaatggactgtcctccactgaactttttggagcaaacctacttagtgtcactttgccattttatttttttaatgacatactgtgctgttggggcaacaaactgcacatcctgtcatgctacaaaagcaaaagacaactttaaccaagataaaaatgaagctggaattcaggcaagaaagtgaaggataaggcagacttgagaggtggggtattgagtggggaagcgttttgaagttagatctgtgtttcagttctagccccaacctttactctctgtaaaggggaaacttataatctctctgttcttcagtttcctcatctctgaaatgggaatactgtaatactacctacacaaagagatttaaccagtattgttgttctagagagacattaaccttgggtttaattttgattgcaggtcatttattcattaacagatttgccaggcactgtattggttgctgggtagattgaagagaccaacaaaatacaatccttatcctcaaagaactcaaaccctaataattattcttagcttgtatccaagtctttgattgtgtagagtagcaagggtgcacactaagtgggttggtaaaaatgttgaaactgtagagcagtaaatgggcctgatgttgaccaaaaggtaaaagccagatttctaactttgctgtgtatcagaaaccagagaagcacatgttcttaaataggtagaccttgaatgctggacgtggtggctcatgcctgtaatcccagtactttgggaggcccaggcgggcggattatctgaggttgggagtttgagaccagcctgaccaacatggagaaaccccatctctactaaaaatacaaaatcaaccgggcgtggtggtgcatgcctgtaatcccagctacttgggaggctgaggcaggagaatcgcatgaacccgggaggcagaggtggcggagatcacgccactgtactccagcctgggcaacaagagcaaaactccttttcaaaaaaaaaagagatagactttgaagctagtagtagaatcattctcatgcaagtgaatttacgtcaaaatttttggatttaagtggcactttgataagtatttgagataccaaaaattagagttcagtcaagagaaattgatgtttgaaacaagatagagaggtcttcagattctaagaagttatgttcgatatggaaataggaaaagcaggacttggagactgatacgaatataggcctaagagaacttttcaaaaagagtttgtatcagacaataccaataccaaatgctgcaaaaatacttgagtgtaatggtgaattgaaaggatgttgaatttgtgataattttgtcatttactactctgagacaaattccatcacctaagcagatataagcaccaaagatttggagaaagaatagtgaaatcaagaaaataaagatacaggtatgtccatggcagggcagaagcctggggatgtcaaaatacacactggacctgctgaagcatgatgagaaaagcagaagcaggtgcacgttttcttctactttccatgccactttggaaaagagtccaaacatttagctaagcgggggcttttaggctgcatacttaagtaagcattatctcctcacctggcaatatcagaagctggagtataatgacaaaaaattgaattcaacagtattcttccagtttagcatatatggctgtggaatcaccagctcagatcttggtataatttgagggtctggtatctagtccctggtacagatgtctcacattgcaatcctgtgacataatccatgaccttaaaatcatggtttggaatccaacagctgttctttcggaatggtcaaggactgaggtcagtttatataatgaggcacactgttggttaagctgatacaccgcttcaacactgcattcagattaatggtttctattgagccacttcttttctctttgcctaaccttgcatcaatagcacaattaccttcgttactttagttttataatatcctaatattacaagcccactacctttaaattctacatcaaaattgtattggcttttcttggcttttgctttttcatttccaaataacaacatatggaattgttctctgcacaaaataggtatttgatcaacggaaaaattagaagattttttttctttatgcatatggtatatttagggtttcatatagattaacaattttcttataaatgtttacatcacataattcttagaattttcaaacacacccaaatataatttatacataatttttataaacagttctattatataaaataattattgctgttcaaatgagtcagttatgttgtttggaggagcaacagagaggcagacttactaaaatatattttagcagaaaaggttttgaaaataatattgggactttagctttctctataaatggatggttcctgcatttactatcaggaaacctgggccactgccattctgaaacagtatttctagagagtgaccaaagagagttggtgtaaaaatcctaaaggcccagaactgaggttaatggggaaaaaaaacccaagctctcggtggaagttttggtcagaataggagatgaaacagagtacagtgagaatcaggtagcttctgatcagtaagaaagtctaccatatatgttactggaatttttaagcctctttctcttagaattctctcagttcctattacatggtagattaatcgaagaaagtcattctgacttcctgttcttggcagtaggaatcacctttctcacttaaaagcagagaacaagcctaatatattctattattctattctctcttctatccaaccaccagtcataatgtgataataattttcagttttagttgttgccctttctacttacttttgtgccataatgatgccttattaataggctatctcatatctttactaataaaaaagaatgtgaataaaatatattaaatcaaagtttgcttgaaaatttacaggaatttgtctacttgaaatatgtgatttaaaacataaattgcctattttaaaaacttagttaaatgtcactatcaattttatttgtacaataaaatatctcgaccggacgcagtgactcacgcctgtaatcccagcactttgggaggtcgaggcgggcagatcacctgaggttgggagtttgagaccagcctgaccaacatggagaaaccctgtctctacaaaaaatacaaaattagctgggtgtggtggtgtgtgcctgtaatcccagctacttgggaggcttaggcaggagaatcacttgaacccgggaggtggaggttgtagtgagcccagattgcgccattgcactccagcctgggcaacgagcaaaactccgtcttaaaaaaaaaaaagaattatctccagagggctaactgaagtcatcacaagagaaaataacattctgactttggtgtctttagaaggatagcctacatcattacaacattctgattttcttctctataaaagggtctctaaaaaatagtattgcttcgtgattctcaaaattcatagctagagtaaaatagctgaggagaaacatgccagatcataggctttgtagacgctgtgtctcccttctaatttactttatgatatatattaaaggcaagagaaaaaagacttttccttgccttaatttcagattagttaaaatggatattttctttgattattttttcttttggtattgttttcaaagttagcatatattgattagagaaaattcaatataaactgatgatgataagaaaaatatggggtcaggcttggtggctcacacctgtaatcccatcactacgggaggtcaagttgggtggattggttgagcccagtagttcaagaccagcctgaacaatataacgaaatcctgtctctacaatacaaaaattagccaggtgtggtggcatgcacctgtacttccagctatacgggaggctgaggtgggaggatcacctgaaccagggaagttgaagctgcagtctgccgtgattgagccactgttcttcagcctgggcgactaagtgagaccctgtctaaaagaaaagaataaataaatgttgggttttgtcttggcagaaaggaaatcaaaagacaatatgtataagtttaacctgtctgtaggaaaatacctgtcggttaaaaagaaaacaaagcatctaataaaagattggataaaggatgagaataggaaattcacagaaaagaaagaacaaataaccaaaaacaaaaaaaggaaaaaatgcttaacctcattagtgagtgtagaaatagcccatttaagctattagtttgccaaatataaagtacttgtgagaatggagaaaatccaacacacatttatttgtgagaggagtatgagtaacctttgtggaaccaaatctgacaatatctatatttggaaataaaattactagtataggctgggtgcagtggctcagacctataatctcagctgctcaggaggctgaggcagaggattacttgagcccaggagttgaagaccagcctgggcaacatagtgagaacctgcctctttaaaaaaaaaaaaaaaaaaaaaaaaagatactaggaggatatatttaaaagttttcgtggtaagaaaaatagcaaaaacgtaagatttttcaaaagaaatgttgcatactagtatttgcataatgactacatgctaggagggattttaagtgaaaataaagcatgttgaagaataactcatatagttatgaccccatttttctgtttaagataaacttgtggctaggtgctgtggctcatgcctgtaattccagcactttgggaggctatgacggaaggattgcttgaggccaggagttcgagaccagcctaggcaacatagggagacccatctgtacaaaaaaacaaaaattagcaaagtgtgctggtgcgtgactgtggtcccagctactcaagaggccaaagcaggaggactgcttgaacccggtaattcaagagtgtagtgagccgtgactgcgccagtgcactccagcctgagccacagagagataccctgtctaaaaaataaataataaacttgtatatagggttgtgattatttgtatgagccatgatggtgtagaagactatatatcagacacagagtgctgaggcaaggttcacctcaggcaagtagaaatggctagttgggagagaggaatattacctttgtttaagtggacacatttgtcattaaaaacaaaaagtaaaagataaaaggcaacagaaattaggaggaagaaaaaaagcccttggaatcccactacttagatgtacagattatatatttacctttgtaaacggaaaaataactatatataattttaaagccttgtaaaaacagtatgtcatagaaatgtttttatgtcagtaaacatacattatcgtattttgatagttgtgtaatagatatatggaaatgctaatattttaggtacttcagaaaccacccagaacacttcagtatttctattgaggtatagttgatgtaaggttaatgtacacataaaatatttgatcacttttaacaggaacatgctctatataaacgataactataatcgtatttatcacccaaaatttttcttatgcctgttttgtaaatccctccctcctgcactactaccctcatcttcatcgccaggcaagcactgatctgttttttgtcactacagattagtttgcattttagaaatcttacgtaaatgaaagcataaactgttttttgtctggcttctttctgagatagggtctcactctgttacctaggttggaatgcagtggcacgatcacagcccactgcagccttgacctcccaggttcaacacatcctcctgcctcagcctcccaagtagctgggacaacaggcatgcactacaatgtctggctaattttttgctgtttatttgttgttgtttgtagagaccgtttcgccatgttgcccaggctgatctcaaactctgggcttaagcaatccacctgccttggcctcccaaagtgatgggattaaaggcatgaaccaccatgcccagcctgactggcttctttcattcagcatgtttatatatgttgttgagtatgtaaagagctcatttttaaaaattgccgagtatggatttgccacaatttgtctgtttgttaacctattgatagacattttggctgtttccagtttggggctattacaaataaagttgctgtgagcacctatgtacaagtctttgtatggacataagctgtcatttttcttgggtgaatatgtatagatgaaatggcagggttatatataggtgtatattaatttttaagaaattgtaagtcattttccaaagtacatttgccattttatattcccaccagtaatgtctgaaaatttcaggctatcttgtttctgctaaatctcctttgtaccacttctataaatacgttgtgcatacataatgagagtcgattgaatggattctctatttttttcaattgatccggttgtcttttcttgttgctcataccacacggtcgtgataaagaagctttgtaataagtcttaaaatccgagtattaagccctccaacttcattcttctttttcaaagttgttttggccattctaggtcctttgtttttctagattcattttataatcagtttttttctatattttttcctgcaaaaaaaagacagttgaaatttgatttgcattgacactgtagacagaattgacatcttgcaatattgagtcttctgacccatgaacatggtatattttgcttttgttttttgtttttgtttttgtttttttttttgagacagagtctctctctattgctcaggctggagtgcaatggcacgatctcggctcactgcaacctccgcctcccgggttcatgccattctcctgcctcagcctcccgagtagctgggactacaggtgtccaccaccacgcccgggctaattttttgtatttttagtagagatggggtttcaccgtgttagccgggatggtctcgatctcctgacctcgtgatccgcctgcctcggcctcccagaggcattttttaaagtattctttaattctctaaataatggtttggagtttctagtgtataggttttttgtatcttttgtcaaatttatatctttagatgcttgtgtacatggtattttttatttcaatttttgttactagtatatggaaatacaatatataatagatttttatatatcagtttcatgtcctgcaaccttgctaagtatacttcctagtcttgttagctgtttcatagagattcctttggatttttctatatggataatcatcttgtttgaacaaagacaaatttacttcatttccagctggatgcaccctttatttctcttgacttactgcactagctggaaccttcaatacaatgttgaatagaagtggtaaaagtaaacattgtcttgttctgatctcagggagaaatcattcaatcttttaccgttaagtatgatgttaactgtcagtttcttattatctagatgaggaatttcgtttttatttctagattgctgagaaattattttagtcaagaatataaattggattttatcaattgcttttcctacatttgttagtaaatcatatggttttttttgtttattaactgcttatttgaaaatatttgacatttgaatattaaaccaacctgcttccctgggataaaacttggccatcacattttttttctttttctgtattgttcaattttacttgctaaaattttatttagtgttttttttttcgggggcggagggtttgtatttaaatttataagggatgttcgcctgtagttttctggtgattgtcatgtttaggtatctgggtaacgacgcagacctcaaatgatgagttagtgagttttctccttcaatattctgggaaagttggtgtaaaattgatattgtttcttcctcaagtatttgcaaagaatccaaacagtctctaacagataaaaaagacaaggaaatagattcttccacagagcctccagaggagtcacagacctgatgatatcttcttgctttttggcccagtgacaccatgaaaacaatatgacccatgatgaggagaaaacaaatcgattgaaactcacaactgacatgcttagaattagcagacaaaatcattagagggttattagatacggttgctataactgtatttcacatattcaaaaagtagagataaggaatcgacataactggaaaacacagaattggtagaaccagtaaacagaaaactagtaaggacctaggagctggaatagcatagtcagccaacttgatttaattgactaaacattcaaacagtagatacacattcttttcaaatacaaattgaagatttaccaagatagaccatattgtggttccagaaacgaggcttaataactttaaaaggattcaagttggaaatcagtgagaaaaatatctctggaaaatcccccatatgtttagaaactaacacacttttaaataacgcagaggtcaaagaagaaatcagaaattataaaatattttgaaccgaatgaaaatgaaaacccacccattttctattttctattgctgttgtaatcaccacaaacataatggcttaaacaatacacattaattatcttacagttttggatgtcagaagtccaaaatgggtttcatttgggccaaaaatcaaggtgtcatcaggtctgtgactcctctggaggctctgtggaagagtctattcctttgtcttttttatctgttagagactgcttacattctttggctgtgtccccttcctccatcttcaaagccagcaacacagcatcttcaaatctctctgtgtttctcctacctccctcttttgcttgtaatgagcctttcgattacattggatccactgggttaatctaggataatagtctcctcatcacaagatcctttattatcacatttgtaaagtcagttttgccaggtagggctacgtattcacaaggttaaaagcattaagacattggcatctttggtgtggtccattattctgcctaccacactgctaaagcagtacatagatggaaatttacatcactaaccgcaactgttagaaaagaaaaaaaaaaaggcagggcgtggtggctcatgcctgtaatcccagcactttgggaggccgaggcgggcagatcacgaggtcaggagatcgagaccatcctggctaacacggtgaaaccccgtctctactaaaaatacaaaaaaaattatccaggcgtggcggcatgcgcctgtagtcccagctgctgaggaggctgaagcaggagaatggcgtgaacccgggaggcggagcttgcagtgagccgagatcgcaccactgcactccaggctgggtgacagagcaagactccgtctcaaaaaaaaaaaaaaaaaaaaaaaattctaataattgacctcaactttcatcttaagaaattattaaaagaagaacaaacacagaaaaagtagaagaaaggaaataatacagataggaaacaaatgtaacaaataacaagaaaacagggaaaaaatttataaaaccaaaaggtggttattgaggatataaataaaattactaaacctggatttgacttttactttgatatttaacatgaaagctagaagtaaaacaatttaaattgtgttatagatatctggcttcgttgtttttagagacaggttcttgctctgtcacacagggtggggtacagtaatacgatcatataaccatcaacccttgggctcaagcaatcctcctgcctcagcctcctaagcagctaggactaaagacacatgccaccacacccagctaattaaaaaaattttttttgtagagatggtgtctcactatgttgctcaggctagtcttggaactcctggcctcaagcaattcactcaccttgtcctccccaagtgaaatggctgtttttgatagaatttaagtctagtttcctcattttattatactgttttgtttctagtgctaggacctcaccaaactaactcatgtaattcaagctctttgtgaagtagtgatagagcagaaagattttgtcataccatgggaagcctaattaccaagtcaacatacatttcaaataacgacctctgagaagatgcggaaaaacactagacctaactctcaagtgtttcttttggttgccatctctcagtggcccatcattcttacatatttcatcgccattgttattcttttcaggtcattacatcttcattgtaaaatttatcctctcacctgggtttcttctttgtgccaccttagtttcttagataaatcatcatattttcctagattcccatgaagatctgtgaaaggaaaagaggtggtgatttgggacagaataggattcacagcctataggaactctagagggacaaagttcttgcatattatctaatcagaatgatttagtgccaacttgtagatctcaaaacttggaaaaaagtaaaaattgtcaaaatatatcaagaatggatgagaagggattaaaaccaggtgataaggatgggaactctcactgaaagttccattattagaacattctactttgtttatgcacaactctgtggcaatgcaccggggctgttccctgagcattagtgaagtgtctatagttggaaagtcttcgcagtctcagttttgtgtcacttcaatctaagagacccagactctggacacattaatttcaaaccttggaactagggagtttatgttgtattccaaaagcatgtggagctacaagggagacttttttgtaattcagagtctcttacttagccgttatgtggccacaagatcttcagctaatctgcacaattcaggcgcttcaggccaacccagaaaattatctccacaaatgtagaaaataaaacagctttattaattttttaaaaattttatcttgagaccaagtctcactctttcacccaggctaaagtgcagtggtgtgatcacagctcactgcagcctcaatgtcccaggcttgggcaatcttcttgcctcagcctcctgagtagcttggaccacaggtgcatgacactatacctggctaattttttaattattctgtagagatggggtctccctgtgttgcccaggctggtcttgaactcctaggctcaagcagtgctccaatcttgacctcatggtggcatgagccaccatacctggccttatttttttagagacagagcctcactctgtcatccaggctggagtgcagtatattttatttttattttatttttttaagtgacagagtctagctatctatatttatatttatataaggggtagaggaagtgtttgcaattaaccacaggtgttctttagctaaagatctaagaaaagggagagagaaaggaaataaaaggaaaataaagatctctttattataccaaggaaatagaaaaaatgttaaactcttacaacttacttggatgactacctgattaataaataagttagtaaagagaagcaatattaagtttatctaaaaattgctgtcagatttatattgttgcatagctaatagtaggatactctgggattaaagatttacctgtcttatgtagttagcgcttttacattcttttttttttttttttttttttttttttgaggcagggtctcagtctgttacccaggctagagtacagtggcacggtcatagctccctgcaactccaactcctgggctcaagtgatccacctactttagcctcctgagaagctgggatgacaagcttgtaccccgtgcctggctaattttttaattttttgtagaggtctcacttttttgcctaggctggtcttgaactcctggcctcaagcagtcttccctcctcagcctccaaaagtgttgggattacaggcatgagccactgctctcaacctcttttacattcttttaacctacgtggaatgatgctatttttggtttttcgttttttcgggtataaaatgagtactctctatgaactccgtaagttctccagatcctctggagatcagaatcatacacaaaattgtaatgtgcccagtaaaattaactgttttaagaatgtgttccaatagtatttttataaagagcaatctatcctacaatctataacaagactaaagtggattagtcatacaggataaaacagaatttgaaatagtgaatgaaaatcaactttaaaagttttacttttttatttctcccaatttaaaattatcattacaagcattgaagaacaaagagaaaccacttattgttcaagtatgtagcctgcatattagcgttaaacttttctttgtttccttccagtttttacataaatattttacatgattataaatgaagtgtaggtataattttgtgttttttacccttttctgttttttaaccttaacctactctctaaaaatcccatttagtctcattagcctgaatccaaatccttgctactagaagtggctcataaaaatctgtgctgtgatttgcctgttgacagtagatgtgaaacttgaccagtttaattttatccttatgtggattttctaaagataatcaagaaggtttttgttttgttttgtttttgtttttgtttttttgagtcggagtctcacactgtcgcccaggctgagtgcagtggcataatcttggctcactgcaacctccacctcccaggttcaagtgattctcctacctcagcctcctgagtagctgggattacgggggcctgccaccacgcctggctaatttttgtatttttagtagagatgggatttcactatgttggccaggctggtcttgaactcctgaccttgtgatctgcccaccttggcatcccaaagtgctgggattccaggcgggagccaccatgcccagccaagaaggtttttttagttcctatttacttttgaataaaatgtcttaatttttagaatcatgtacatttagctcttttatagttcttcactgcctattcatctttttagaatcttttttaattttaattgtctccctattaattgattgctttcaaattatcctgctacgtagcactaattacgagcttttaaccacttaatcaaaatttagcagattgggtcaagtgtggcagtggctcactcctgtaatcccagcactttgggaggccaagtcaggaggatcacttgagcccaggagtttcagactagcctggacaacatggtaagagaccatttctacaaaacattaaaaaaattagccgggcatggttgcgggtacctgtggtcccagctactggggaggctgaggtgggagaatcacttgggcccaggagtctggggctacagtgagccaagttcatgccactgtactccagcctgggcaacaaaggaagaccatgtctccaaaaaaaaaaaaaaaaaaaattagcagattgactatataagaattttaacagagttaatttgttgttaggacagtcccaaagaccaaaactataaagcttaaattcttgtttgaagttttgtgggggaaaaaaacaaaaacaaacaaacaaaaaaaacagtataaaactaaataggtgatgtgcctataattatgctttttaaatctcggaaataaaataacccaaaatgtttacaatgtctcaaaagataacacataggtgttttttttaactttatatctgtctatactttataagtgctcttcaatgggtgtatctttttatgattagaataaataaataatctagataaagggagattatgccagtgatagcagtaacgtttgtcattcttgtacttactgtgtaacatttctgagtcaggattttagactaaaaaccatgacttaactattagcagtttctttaagagctgatatttctgcaaagaaaaagagagtgcatgttctagatcatgtgtctacacagaatagttcctcaggatgcattatatccctgtctcttaactactcttgactctgctatccctttaagacgtacaacaattttacataaaagtttttctccatattctttttttttttttgaaatggagtcttgctcgatcgcccaggctggagtgcagtggcgtgatctctgctcactacaacctccatctcccaggttcaagcgattctcctgcctcagcctcccgagtagctgggattacaggcacatgccaccatgcctggctaatttttgtatttttagtagaggcacggtttcaccatgtgttggccaggctggtctcgaactcttgacctcaagtgatctgcctgccttggcctcccaaagtgctgggaatacagacgtgagccactgcgcccagcctccatattctaactacctcagacttcagggaaaactatttttaaaaacacatgtgggttttataaaaaccggtaagtttatgaaacttttacattagccctagccctcagtctccaagtccagtgtttatctcttaggttgtatagggatagttgttaggtcttaatttgcaggagtaacaatttgaatccagttaagcccacataaaaagtaaatgaaaaactaagagactcttccatttatggggatgacttgtattacatcctacagataccagaaaaatgttactgtaaggtgcgctctttttgaaatcttaagatgaagtcctttccagttacagaatttttgatgtaacacatcaaaaattgtttccctccaattaactgtaggaacagtaaactgtagcacagttttaaaacttacatagagagaagacagagaatctccctaaagcccaatgattaaacatgtctgttaatttgtccattagacgttttacaaaacagctctgaagaaaaacattttgttccaatagcataaaaatttgcaaaaatcaacctactcatctgacaaagggctaatatccagaatctacaatgaactcaaacaaatttacaagaaaaaaacaaccccatcaaaaagtgggcaaaggatatgaacagacacttctcaaaagaagacatttatgcagccaaaaaacacatgaaaaaatgctcatcatcactggccatcagagaaatgcaaatcaaaaccacaatgagatactatctcacaccagttagaatggcgatcattaaaaagtcaggaaacaacaggtgctggagaggatgtggagaaataggaacacttttacactgttggtgggactgtaaactagttcaaccattgtggaagtcagtgtggcgattcctcagggatctagaactggaaataccatttgacccagccatcccattactgggtatatacccaaaggattataaatcatgctgctataaagacacatgcacatgtatgtttatagcagcactattcacaatagcaaagacttggaaccaacctaaatgtccaacaatgatagactggattaagaaaatgtggcacatatacaccatggaatactatgcagccataaaaaatgatgagttcatgtcctttgtagggacatggatgaaactggaaaccatcattctcagcaaaatatcgcaaggacaaagaaaaccaaacaccacatgttctcactcataggtgggaattgaacagtgagaacatatggacacaggaaggggaacatcacacaccggggactgttgtggggttgggggaggggggagggatagcattaggagatatacctaatgctaaatgacgagttaatgggtgcagcacaccaacatggcacatgtatacatatgtagcaaacctgcaggttgtgcacatgtaccctaaaacttaaagtataataataataaaatttaaaaaaaaatttgcaaaaatctggaaatcagcattacctttttgtatttttgtttttattcatattttaatgtagttgaaattaaatgtgtctgtaagagtttagttcttaggtgggggagtccaggtaattatgaatcctatgcagagactgtcgcttgtcctgtcatgctttaatacaagacaaggaggaaacaatctatgtctttgccttgggaagtttaataatactgcctttgcctagaactgctattatttgttcagtcaacaaattcgagtgccctccctgtgcaatgaactagaaagtaaagaacgaatctaagacagtatcttaaatttaattcccccattctagtttaatcagtgttaattatcatgaaaatctgtgtcactctctgtcttccctctccctttttcttcctgactgcttcccttctactcccttttctcccccttcattcctcagcacacccaaattttactgcacctttctatcagtaattgtaggagaagggatatatgccccaacctcactgggcattaggggtgtgtgtgtgtttgtgtgtgtgtgtgtgtgtgtatccagttttttttaaggactaagtgtctcctaaagaagtctgtgctctttctgtccctctttttctgaattattgttttaaatcaagactttaaatagccacttaaacaagatgagtaacaattctcactggctcagtagctgttttttttccaagtatgttaaatatgttatattactgaaggaagaaatattttgtttcatgttttggggttgagtatatttgatatatttgtggaaagaaaagtttatctttgttttttgttgtttagaggaagttccttttgagcttatatttgagccccaaaaatcctccaaaaaattgttcttcctcttttccatgaatgagatttagagctaaattcatacaaatgcaaaacaaaataaaattacagattctctgaactctataactcctaaaaagattcagctatggaagcagagttgaaaatcacaagaattttggaggaaatgcattaaacagactggttatatcaaatcagaagatccacaaaaaatgcaaagagacaactgctgaatatatgtattcagtagaagcctgtgagacaatagcaaatttaaacccacccatggtttccatcctttgaaaaaatttaccttgagtaggacacaaaggaagaatgtcagctggtctattagtgtttccttaatggttcctgaggggaagaaaaaagaataattggtgtgagatgtgtataacaaagaagacatgcagagtattttttaagatggtacagtaattttgaggaaaaaaattaatattaaacgtctcctttttcttgttcccccaaaaagtgtgtgttccaccaaaaagtgtgtgtgcacgttctactgtcataccaaaaaagatgagactgtcccagagtctcagtgaattatcttatatttctgtagggaatcagattagatgataccctttagctttgtgtttatttgcttttggtaatgttccctattaagtggcctttctttaactcttctccttgttcatccttctatagtacctcactcttgtctattgattcataagttgccctctgtagaagcagtttaatatcatcagcttactatctgatggttaaaatgtctttcacttatacacccatgattctgtggaatttgtaagccagatgaattttttaaagccctttgtaaacttaatcctttaatctagaaatctgaaacaatggaataattcagtaaaaattatctattttcttagttttcactctatcaatatgaaaggctaggcaaacagtcctgatctgagatgaaaacagaatgtttcagaaatgctgcctatctaatgaaaccttaattgaagtatccttttgttgtctagaaaacttaaaaataacagaatcctgagcgtattattttttattgcttgaagtaactttagatatctagtctcactcttatactttatagctgagtaatgtaggggcctgagacctgtgacttgcttaagttcacatagttgatgaatagaagtagacccaggtctagaactgaatcacaagtcagttttcttatgtatgtactcatcacatgttgaattacatgctgggatatttctaaccatgaaatgggaagaacgcaggccactggttagaaagctacgagtttgtacccacaacacttgatgttgcaatctctgggctactacacaattgttcacttgatcagccaactatttgtttggtataggtaaagttctcttttatcctgcttaatttgaatataggtatcacttagacctaatatttctcagaatgactttgcagtggcaagtaatgggcctgatcttgtatttcagctcaaatagctataactgtaccaaagacatggaagaaaccaaaagatcggacccgaaccactgaagagatgttagaggcagaattggaggtaagcaaatctcttaagttcatattcagagcagtggtgccatttcatagacaggtatgtgtttatacctatttattgaaatagttttccaagcaaaacttaatatatcaagctcagagactaattgttttaagtccattttatattagaattttaaaaagatttttagtaacatgtttgatttcattgaatacttatttttctttcaaaatacctcttttaaaataacaaacttggccaggcacagtggctaacaactgtaatcccagcactttgtgaggtgaaggcaggatgatcactgcaacccaggagtttgagaccacctgggcaacataaggagaccctgactgtacaaaaatgttttaaaatactagccacacatggtggcgcatacctgtggtcccagctactcgggaggctcaggtgggaggattgcttgagccctggaggtggaggctgcagtgagatgtgatcatgccactgcactccagcctgggcaacacagtgaaacattatctcaaataaataaataaaatgacaatttttggttaaccttcctcttcccccaactagaacttttgtttgtattaactggatagaaagataatctggtaaacaaaaatggagagtttttaaaaataccattagtaatggtggtagaattcatctagtacattataaaggaattgattttgaatctgtcatctgttaactgcatcccagaaacataacttttcttcatatggttgtctgtcttaaaataagccatgcgagattttgcttcagattaaaacataccaagtccaagagatgaatgtgaggaagaaaaaggacaaatcagtcctaaggattactctaacaatttccttgtctgtaatctcaacatccttagcattatgtattgaagcttataaatgaagagcaatgtaaatctgtatgtagctttttccctttttttgactattcttttagctactttattaaaataattttactcaaggtttaacatgataaaattaaaattttactcaaggtttaacatgataaaatataaaaattatcttaagataactttgagtgtgtttacttcattcggcttttttagcaagttataattcttaccttctttgggtatctaacagtaccccttggttacctcccctgtgccttcattgctgttacatgatgctgtgttgatgtcactgttagtcccatagcaaccactaaaatgttgatcgttgtgatttcattgtggttattagggtgtaaaacttggcagtaaggtatagaggtgcaaatagtcattgcactccttttgcagctgaacctgaaaatgttcctcctacagagaataaaataccttccagaggcatgggaatcacatacattcctgctgtggctgttaagagcttcattaacttctttctttttagattcagctggtttttttgttatttttcttctgttatacttcatgttggatttctaagcattattgaatattatataggccactcctccattgccttcaaatattcatcctaatcttcagcttgaggttcaccaaactttttgtgtaaaggtccagatagtaaatattttaggctgtcacaattcctcaaatttgccgctgtagcttaaaagcagccatcaacaatgtgtaaatgaaagaagcaaggttgtatcttcacaaaactttattggtggacattgaaatgtgaatttgtatgccaggaaatatttttccagattttttcagatattacaaatataaatatcatccttaccttgtatgctgtgcaaaagcaggcggtgagccagaattggccctcgggccagagtttgctataaagcttctttagcttgttactcttgaaacacaagaactgttttgacttattttgaaccaatcactttttcttaactttatagtttaagacaaggctgggcgcagtggctcatgcctataattctagcactttggtaggctgaggcaggaggatcacttgaggccaggatttcgagaccagcctggccaacatgacgaaaccccatctctgttaaaaatacaaaaagtagctggccgtggtggcgcgcgcctataatcccagctactcaggaagctgagacaggagaatcacttgaacccagaaggcggaggttgcaatgagccaagattgtgccagtgcactccagcctggacaacagaacgagactctgtctcaaaaaaataaaataacctaaaaaatttttaaaaactaaagcaagacaaaaaatatttgctttttacatagtgacttctttcagaaatccttttttctgtctttcctaaaactgagcttttgttggcatagtgtagtaaatactggatgccattgtcttcatttccactaatcaggctccccctttcttagatttattttgtcagcttttaaaataatttgtttctggtatcagcttatttgggttacatattaggttgttgcattattaaagatatttatcaaaattatagtctagaggctgggcatggtggcttacgcctgtaatcacagcactttgggaggccaagaagggcagatcacgaggccagaagtttgagaccagcctgaccaacatggtgaaaccctgtctctactaaaaatacaaaaattagccaggcgtagtagtgtgcgcctgtaatcccagctactcaggaggctgaggcaggagaatcgcttgaacctgggaggcggagattgcagtgagccgagatcgcgccactgactccagcctgggtgacagagcaagactccgtctcaaaaaaaaaaaaaaaattatagcctagaaaagtaaggatgaaggatgatttcatattaaaattgcttggcaaagtatcttaaaataagttttaaaattttagagcatttcatcaattattatatacatagttgccagtctgattttctagcacttttaaaaaacattgcattaagcacagagttctgtcaagtgaattcttaacagattcctataaaaggtttacctttggctgtccagccaatgaagtcatctctttcttaaatctgtttctgcataaacaatttaggaactgtacagactagttgactaggattttatcctgctttaaaaaaaacccataaatatttaattaagctatttttgttattctcttcaaatacccctcatagtaatacacctcagataattcagtgattctgtgttctctgaattatggtttgttattcatagaactagtttctttatacttctttttccagttagaaattaaatttctaagtaatacagcctctgtttatatatgatagactgttgttgattgtaggtacagagaagaggatgcactgtattctctaaaaaaaagtttcacattttataagatctgaaataagaattctgtataattgtataatttggttatgttgctctttaataagtttaaataccatttacatactgatatctcagattattaaatgtcttcttgatgacctgtacttaattatgagatggtattataagattattataattagactatagtagagtctaaaatttttaaaaatgaggctgctgattcatgattcaaatttggtagatctggttttttcaatgtttaaatgatacctactttctgccatgctttataaaataaattgtttccaaacttatttttttggaatattatgtctgtctgtcttttgagggtttttatatactatctttttccatgaattagtcgggggaataggtgtggggtggtgtttgtgcatatttgcatgaactttttatttccattattagaaacagagtctaaaaaccatctgtttctgttgataacattaaacaatttattggcttttcaaccatgatctgttatatggtaaaagaaaatttactagtattatatctgttttaatactatctaacaaagaagtatttgtcactcaaaaattgttttaaacataatttcatagattatttggggtgaacttttttctgctatatatgacactactttacactatcctctgctgaaccagctccagtttttggctcttctcctcgtgtgaatttatcaattagaacacctctgagtagttgtttcagaggattgttttcagagtgcatacccatcgtgaaaagagttcacagagaactttgcctcaaggagttttgaagattcatgaggcctttacagagccatttgtgtttgatatctgacgctaagatggtcaaaaataatctagggaataacttcaattctttttcgccttctgaaaataggtgtgatactccataacccagatttctcttttttttttctctctctctctttttttttttttatatacaagatttttctatatggtcacagcctcagagaagtctaagaacgaataacaaaatagattttaactagcaagtggcctttttgtaaaatgagatatgatcagttttataggacttagatgttttaagctattctccagactgtcaatttcacagccagaagacagtgtaaaaaataccctccagtgtttctttttatatttgttgagctttaatggcaagggtagtgtagtgcttgttttagattctgactaggactctttcatgttcataaagttccatggattaacagttctttccattctaacctttggtatatttggatattattagtctcatgttaaagcatttcagcagccatttgaatggtcttccttttcctaggtgctgaaatgagaaaagtattttttttaaactcagcattctaataccacatgctgaacacagacattcttaccttgaatgacatgttttcctttgctttttgaagggagtagatgtaggtttttatgtatatttacacccgtggaaaaaaatgtaacctctttgttcatttattatttagcttaaagctgaagaggagctttccattgacaaagtacttgaatctgaacaagataaaatgagccaggggtttcatcctgaaagagacccctctgacctaaaaaaagtgaaagctgtggaagaaaatggagaagaagctgagccagtacgtaatggtgctgagagtgtttctgagggtgaaggaatagatgctaattcaggctccacagatagttctggtgatggggttacatttccatttaaaccaggtaagtttatacctgccttcctatgtacctctttatccctctactgcaaccttagagaaatgttgcctctttttagagagatactggatggaagaaagaggtttatcacaatataatatttacaggacagatcagcaagcccaagttagtgactagcaaatccagagagttctgtattgctggaaatgatacccgacactggtattccccttttactggcattggaagagcatctggcagagggaatcagacagtgccatgctagtgggtgcagtttgattttaaaaattattgcattcgttttaattgaaagggatatagagatattaccacattcctcgagatggcgttagtcatctttcataagacttgatctctgttgacagaaatcactctgtggaactgaattctgaaacaatgtattgagtacctgcagtatgggaagttccctgtggtaaatatgtatgataaacaagtaaataaggaatatatatgataaacatatggtaaacaaatataaaccctggaggatttttttatcttcagataccatcaaatgcattaaacctctgtcataatgctatataaactgtgactgactttgagatatatggagagatttggtatggatctgtaaggaaagatggttcctttgacagaaagtttgggctgggtgcggtggctcacgcctgtaatcccagcacttagggaggccgaggcgggcggatcacctgaggttgggagttcgagactagcctgaccaacatggagaaaccccgtctcgactaaaaatacaaaataagctgggcgtggtggcacatgcctgtaatttcagctacttgggaagctgaggcaggagaatcgcttgaacccggaaggcagaggttgcagtgagccaagattgtaccattgcactccagcctgggcaacaagagcgaaactccatctcaaaaaaagaaagaaagaaagtttggagtaggtgaaaagttttccttagtctgccaaatctagactaagttttgcaggaggtggggtttgagtgtaaaataccagacctcaaaggtaatctagatcaatatttttcaaactgttggatttaatacatttaatagattgtgaaattaataggtcacaaccaacattttaaaaaaggataatataataaaaaatgtcagtctattacatgtaagtaagaataagtattgtttttagaaactttgtagttatatatgtgtttataattgtcccgggtcatgaagtcattatgtcttactgtgagttgtagtcagagatgtttgaaaaccaatgactagtacttaccactttattttatattatttttaaaagtttttatttattgtttattttttacagagggagggtctcactatgttgcccaggctgctttcaaactcttgtgctcaagcagtcctcctgcctcagcctcccaaagtgctcccatgcccagcccttaccactttgatatactgatctttcactaccagtaaaatcctgttaatgggctttatgaaattgtaaatttatgctatcataaaactttttttaaaaaaaccctaggactcagtgtactcaattgcttttgtcaacttaggcttgtatactgtgttcaaaaataaagaaaaagatctaggcttgtaccaggtcacagagtacttgtagccatcaccaatgtgtcttaagaaaatggaaacactattgctatttttagactatgcaaattatatttttatattaatttattttatgttttaatattttgtatattgcataatttatgttacttatattttatattatattttaattcttttcatccatcagttttacagtataggccctgactataattgaccaactaccttttgcccttgtaatatttaacagcagtaattggaaaaaagacaatagtcattggaaaaaaaacagtttgaaatttagatcccaataagctgtctactttttaataaatataatagggtaataaagatatggtggaaaacatttggaatattctcaaagacccatcagcgggtctataacctacacattaggaatctctaatgtaagaaggatccaatctgctatcaggaagtaatctggagtctgattttgatgagttttattaattaaaataagaaaactgtgatttttttttagatgaaattataggcaggagaaaaaacttagtatctaactgcatagacagttcattatcttaaataagttgtttctgtgttttgtgtccttttgcttttttttttttctctaaaataacatttcctagtgaacaaccaaagtagccttttttatgaagccaagggttgtatcaggttccttatttcttagttatttaagttatttagttatttaagtcttatttctaagttatttatttaatgaggattattacatgtccctggccaaaggttacttagtgtgtatgtgaagtgattcctacttgctttagattattttactactcaaaggtatttagaagggatgaaagaacaagtgatggtttaaaatctttacatattttctgactgtatttcattgttcccttctattttttgtttgttcatgaagagataaatactggaatgtggtttgtactcttagggaatgtaggtcatgcatcatttaatgacggtgatttgttctgagaaatgcatcattaggcaatttcttccttgtgcaaacaaaagagtatttgcacaaacctagatgttctagcctactacacacctaggctgtatagtgtagcctactgctcttaggctgcaaacctgtacagcatgttgctatactgaatagtaggcagttgtaacataatggtaagtatttgtgtatctaaatataactaaacatagaaaaggtatagtaaaaatactatataaaagatttaaaatggtacactgtatagggcacttaccatgaatggagactgcaggacttgaagttgttctagatgagtggtgagtgaatgtaaaagcctaggacattactgtgtgctggtgtggattttataaacattagggcacactacatttattttaaaatgtgtactttctctaataatgaattaatcttagcttaccttaatctttttacttgataagctttttaattttttaactttttgacttttataataatatttagcttaaaacacactgtatagctatgcaaaaatatttctttttcctttttctttttctttttctttttttttttttttttgagatagaatctcactctgttacccaggctagagtgcagtggtgcaatcatagctcactgcagcctcagcctcctggactcaagtgatcttcccacctcagccacctgatagctgggactacagttgcatgtcaccatgcccagctaattttttaaaattttttttctagagattaggtcttactacatcgcccaggctggtctcaaactcttggcctcccaaagtactgggattataggtgtgagccaccatccctggccttgtttctttatatccttattctatatgcttttttctatttttaaaattatttatctttttacttgttaaggatttttcttaaaaactaagacacaaacatatattagcctaggcctatacacggtcaagatcatcaacatcactgtcttctacttccagatcttgtctcattggaaggtcttccggggcaataatatgcatagagctgtcatctattataacagtgccttcctctggaataattcctgaaggacttgcttgaggctgttttacagttaactttttttaataaatagaaggaatatactctagtgatttaaaagtatagtacagtagatacataagccagtaacgtagttatttcttgttactatgaaatattatgtgttatacttgattgtatgtgctatacttttaaatgactggcagcacagtaggtttgtttacactaccattaacacatacatgtgaataatgcattgtgctgccacatgaggatagttacagtgtcattaggcaataggaacctttcagcttcattatagccttatgggctataatgttgtatatgcagttgtatatgcagtttgttattgatcgaaacatcgttatgcaatgcatgactgtatataatgccctacaaacagtgtctgcctatattcctctttctagaatcctggaagcctactgatactgaaggtaagaagcagtatgacagggagtttctgctggacttccagttcatgcctgcctgtatacaaaaaccagagggcctgcctcctatcagtgatgtggttcttgacaaggtaagctgcgtactcagagaaaactagttctttttggtgggaactgattttaactataagagcaaatatgtgaagtatgagcagtttttagtaattgttagaccaaatgatgtaaaaatatctaatgtttaagaatttgtttccctaaacactgttggattttgagtttcttataggttacagtcattttgggatttggcccatgttggagtggtggttttttttaatgtttattgatttatctgcttattatggctgttttttggtgaaataaaaaattttgtgtttgttgggggaaacatggctaaattgatacggaggtctttcctcattgttctaaaagttcattatggaattctattggcattgaagacaggtcagaaatctaggaaggtatttggcagatcaaacataagtgagagtcaacatgattcaaataatatgtatctcaaagtttccctaatagatacctccagtgattgaattctccaatcttgtgcaaataggcatccttcctctttgcatctgatctttatggtgcacacagcaaattagtacagtcagtatttgtttactaaattaaaaggagtaaagtcagatctactaaagtaatttcatcagagctgatgattaagcttgaagtatttttgttttgtagaggaacagaaatgtaaaagtagagattaactatcttatggaatcatatctacctcttaaccgatttatgcctagtgtttcattattggaatgctaagtttgtgagagttatttatatcctactcttcaaggtcataaccaaggtctgaattttcacgcaaaaaaatttgcagcctccggcataaatgggttagtaaagatgtccagcagctgcttatccagaactcatttatactattttactttcttatagcaacaggtcttcttacttctattggtggtatctaagtcttctctcctagatacttatgtgaggacagctgaatgactgattaatggtgctaatttgaggctacttcagtacctcagaagtcaagtgttatatccaccaaattcaattatcctcttagaaaatattcctgcctgtcctgctgccttatctgtttatgactttggccactaattagttgatttctcactgatctgcttaactttatgttgtccatggtcacattacatgcttattcaaagtcagatatctcagattaacaaggcagacagtgaaattttaaatgaatcatcacctatgaaacatgtctcctctaagacttattgtccactcatagtacattctttactaaccataagtctacagcatcaaaactaaaatgagcagtagcaggattcgtataggcaagtgctctatatcctgatgaatatttttttttaattctaaaatttgaccctagtatagaggatctcaaaatatcttgtcttgtgccattcagttggtcctcagtatctagtgagccagtctgctgattatgtatagcccctacttggaaatttaaggcctaaatcattcccagcgtatcagaaaaccattgttttagcctaatggctctaagagtagcccaggagaagctgccatggatgagattggacttctgcgggttccaaagctggtgcttaccgtttcagctgatgtaacttttcagtaaaaatttttgttatcttttgtggcagggaatgctctggaacatgtattaagctttcttttgctttttcatgcagatcaaccaacccaaattgccaatgcgaactctggatcctcgaattttgcctcgaggaccagactttacaccagcctttgctgattttggaaggcagacacctggtggaagaggcgtacctgtaagtgcaagttccctacaactcacttagttagacactggcacagactccatgaaatcctacctcatggcaagacagcagcttttattcgttgattctagtcaagaagaagaagaagaggcaaagactatcctttccatactcatattaaagcagataaagaatacacttgagttctttttacttggcagaagctagtctgcattaatttggtcttgattttttttttccctattttttcaattgaggtgacctgcaaataggtttaaaaatagtgccaaccatggccagggatggtggctcaggtctgtaatgctagcactttgtggggtcaaggcaggaggatcacttgaggtcaggagttcaaggtcagcctgacaacaaagagagaccctgtctctaccacaaaaaaaaaaaaaaaaagaaaagaaaaaaataggccaggcatgctggcgcatgcttatagtcctagtcccagctactcgggagactgaggtgagagaattacttgaccccaggaggtccaggctacagtgagccatgatcatgccactgcactccagtctgggtgacaaaacaagaacaggaagtccaggcttcagtgagccatgatcatgccactgcactccagtctgggcgacaaagcaagaccctgtctctgaaaaaatatatatacagagcgagccaaccttgataagattcctgttttgttttgaggtgtcctaaaatactggagatctctgatgacattcagctaatgatcatgtctttgtctttgtttctacagatttgcaaagtgcagagcaggcatggattgccaattctggaacagagcaaagccccaacttgccctccactggtgatgtcacacccacccatgaagagcctgcctctaggggtgcgctgaacactttgttttttgtaataatagtctctggtgttataatattttctgttacgctctttttatttactattgattgttaagtcaaaattttaacaaatgacatgtacaaaagagtgcagtattggtaaactgcagattgccattacacccccagtggcaggctctttcagcggtggaagtggcatcaccagtggagttatgctggggcactgcactgtgcaggattcggcaggctctgcctactccatgctttgtagacttgcagaaagcatggggaaagttgccaatgatgttgaatgtctcttttccccaagttagaatggcatagagagcaataaatctaacattttggaggagcttggggtttgatgtacatttgcagataaccgtgttacttcattttatgtaaggtgacactttttgtttccgcatcacctttttatttctgaaatggcaacttttgaaacctgctttgaaataagactacattgtctgaaaacaaatgtcactttgtagatatttaaattatttgattattttcctgcaaccgaacagtgatggcgtatacttgaatgcctacagtgtgttggaggctttgtaaaactaccgaaaaccacctgaatttgaagcatactgtttattgagccattaatccatcaccattttagagacctgtgtatgtgagatactctgtttctcacacatttatctattttcaggaaatactaaattaaaatttttctaaatcttgagttacctcaccagaaagtcttagaaagcagctttctagaaaccattttatacccttttttttttttttgagacagagtgtcgctctgtcgcccaggctggagcgcagtggcgtgatctccactcactgcaagccctgccacctcctaggttcacgccattctcctgccttggcctcccgagtagctgggactataggtgcctgccaccacgcccagctaatttttttttttttttttttttgtatttttagtagagacggggtttcaccgtgttagccaggatggtcttgatctcctgacctcgtgatccacccgcctcggcctcccaaagtgctgggatgacaggcgtgagccactgtgcccggcccattttataccttttttttcagtattatttccctttttaatgttgaaatttttatttgtgttactgttcattttggttttggtttatatctttgttttgccaaatatttgaaataatgttgatgctattttgaatattctgtggataatagcatctgtggttattatcatattgcccaatgttgttgatatgtgactcacaaaatgtataaatcctcttccagtgtcacttttcactaacagcttgctagtcattgtttgctaataactagttataacaaaaaggaaatattgtgagtttagaataagcaatgtctcttttaaattattgaaaatagaaaatgattttcaaaagtaactttatcacagcatataccactcctctgtatacctacgtatgtgagatcagtgagttattctggtacactcaaagtaatgtgactagaagtgagatgttatctagaatttgtagtagctccaaaaagatcaactttaattatttaatttacttttattaagcagctttgttctgtgtcagaagctagtttttaagagaaattttgatgtctcagggtaatgttgatatgttaagccttaacacaagttattcttccagcctatctcctagataacagacattctccacttaatttgcccagcttaccttggtatattgatgtagatacagatgggaatgtcataggacataaatatcaacatataaaggaacaaaaatggccaggcacagtgactcatgcctgtaatcccagcactttgggaggccaaagcgggtggattgctagagtcccggagttcaagaccagcctgggcaacatggtaaaatcctgtccctacaaaaaatacaaaaatttgccgggcatgagggcacacacctgtagtgccatctacttgagagactgaggtgggaggattgcctgagcctgggaaacagaggttggagacagaggctgcagtgagccaagattgtaccactgcactccagcctgggcaacagagtgaggctctgtctcaaaaaaacaggacagaaataatgctgtttggaaaaaagcaacagccctactctttgcagtttctgattccatacttcaaataactttttccagttctccaaattatcttataattaattatcacttaatgatattaaaatctatgaggtatgccccattattatcttaagtagccatgacttctaatataaacttttctacagctcatgcctgtaatcccagcactttgggaggctgaggtgggcagattacatgaggccaggagttcgagaccagcctggccaacatgacaaaaccgtgtgtctactaaaaatgtgaaaattagccaggcgtggtggtacatgtctgtaatcccagctactcagaagactgaggcacaagaatcgcttgaacccgggaggcggaggctgtagtgagccaagatcacgccactgcactccagcctgggtgacaaagcaagactctgtctaaaaaaaaaaacaaaaaaccaaaaactttgctgtaacagacttgctataaaatatttttaatgtatgccaatgattttaaaatgtcatatgcagctacgtagttttcaaacctaagtgtccttcactggatagtaaagtgcatatctgttggaaattaccatgaaatatcatgtctttagttatttttaaaataaaattatgggccgggcgtggtggttcacgcctgtaattccagcactttgggaggccgaggcaggtggatcgcaaggccaggagatcaagaccatcctggctaacacggtgaaaccccgtctccactaaaaatacaaaaaattagccgggtgtggtggcgggcgcctgtagtcccagctactcgggaggctgaggcaggagaatggtgtaagcccgggagcttatagtgagccgagatcgtgccactgcactccatcctgggcgaaagagcaagactccgtctcaaaaaataaaaaaaataaataaaattacttatcagttgtgttagtagtctttttgcggacatcacagaaagcactccaaaaaatatatcttaagaggagcattggacctatataagtaatttgccatttatacttattttaactaacttttgagataaactgatcaatcataaaaatcctagcagcaaagaagaatcctaggagtaaagtctttctttaaaggaacacttggttgtcttccttctttaaaaatttaggtgtatattgattctcttttctttggttatccaagtaggcagtggaatttaagattacagtctctgaataagataggaatgatgtatattaaattgcaaaacggagatgggtataatttcataatacatttttgaaaactgacagtgggtaaaaaatgcaaactttaacgtcacctgaaaaaagaaaatggctcactaatcaaccccagactttgagatttttagttttgacattgtggaccttgagcacattataccttaaagttccttaaagtactgtctttcaaagaaagaaaccaggtgtcgtttctttttgtgtagcccatacctcttagcacaggatcctagattttttgtgtgtttagtatataaatcattcatcatatgttgctacttctgaaggataccataaatttgattatctgtattaagattttcacacacaaaaagggacatgaaatgtttaaatttatgtatcagttttttaaaagttccttttgatcctttggtgttgatgataatatagtttttagggtccttttacatggtttatatcctataatcacaataatgttttcaggtagggctggcattgtatatatgagaaaacaacaaaactaagagacttgcctatagtaactttgctcatatatagcagatttggactctagattctgattcttttgtctcctaagttcactacaccacagttttccaggcattgctattccaaacagtgaattcattctcagagtgtaaatatgggcacattagagattgattaattgaacatattaagaatttgtaagtatagtagatctattaatagctagataaatatttgagaacagtgtctttatcttagttataaccagagatacaattataatttaaaattttttcttgggtgctttcacgtgggttataattttaactattttatcctggactaacaatttatcagttagcttttcaaagttttttttcctttgaagcattattgttactttctcacgtctctctgttgctcatttgaaactcacacatatttgtcttgggtcaggtaaagaggtgtggaataaatcatattgccattttccagattcaaatctcaaggcatatttattcattggtgtttgcagtaggttttggtaatgggcattttctgactttgtctcctaatgtgcatctatggctcttaattggttttgacataatttcctttcattgcatccagaaacatttgttcttgacaatgtttatgtacaaatgcatggattaaattaaatatcttgtgatataattgtttacctgaggtttagccaaccatttagtaagttattaatccatataagtcaacactagaatataacttgaattataaaaatcaggcattacttgattaccacatttttctatcagaattgtttcttctgggctactatattaaagtttcagttacaatttatgttcttatagtagtactgtctggtttaacaactgttccctgttggtatttttccaatctgatgatctttatttcctttcagttataccatgtgtctcatacctctgggtttatctgacctgtttgttttttttttttaatgtttatcaaataatctgtgatatcatcagtactgtatccttagctggatgcatttgacaagattggtgtgaaattttgcagaaaccctaacttttgatcctgatgcattcttgatactaccatttctaattggggcagatggtgaagcataaaggaataattctgagaatgattgatgtgtaaaggtgtttgagcttatcagcttaggccccagactgtgttatcgcctagaaactgtatttttatgtaatgaatgacattaaagtctagacttttttctctgaagcgttaaatgaattcaaaagggcagcattggggccttaagtgagaaatgattctcatctatgtgtgctttgtatgaagtttttattctctcttgaaatctaatggctagcccttcagtgcaactcagaaagaaaaaaaaaaaaatctggtggcagtatttgcccagcactaacagaatgatatatcagaaaaagtaaaggttgtcaacatgcagcaggtctgcttgaaggtagcagagcttagtatcaacccaaatatttaaccttgaaaaattatttccaagcatttaagatagtaattatgaatattttgatacacaaaatgcaacttttaacttactctgttatctctacttagtgtgctggcagtataacatggcaacatacattggttttaacataagggtatagtgggaatccagcaggaacagagcagacaaataaaaggaagccttttttttcagggagtaatttagtttgactctcattgatgatatataacgggcttattttagtatttctgacccagcataatgagtggaatcttttatgatctacagtaaggcttagtgatgatattaaatttgcattttaccctgggattgtagaaacccagttttagcagatttgtaactatgatgatacctacctgtgaatttttgtaattattgaagtgaccagtccacagttattcaactaataaaagataagcttaaattaggactagtctttctcattagaagtaacggctttgtcaaacatctggttcaaaaaggcctcttgttcaaaagttgtagtggtggagaacattacattgatggtattctgaagttattttttttacccccaaaaaagattacctccagtttgagtacctagtacccaatctttgcatctagcattgcttggcgtagtcatcagacttgacttgaacagcacaacaaagccaataaattgtaagtactctgaatagctgtaatattcttgtcctagttgttgaatgttgggtcacgaagatctcaacctggccaaagaagagaacccagaaagatcatcacagtttctgtaaaagaagatgtacacctgaaaaaggcagaaaatgcctggaagccaagccaaaaacgagacagccaagccgatgatcccgaaaacattaaaacccaggtgagaacaaaagcatatcctaacattcttttgaaattatattgattttgttttaacttattttgctttgctaatgtttctagagataatcagtttaagactttttataacattttcctattaaaagaattattctaaaagccattatggatgccaggcaacctactgttttctcttgaaattgctttatgtgtattttttcagaatagttaccaggtctagagggttcatgtgtcatagacttatgtaattcaggcttaagttaatatttgcttttctttaaaatacatttttagattctcagtgattgagtctctttatcctatttatcctaattattacattgctttatgttccttgtcaggccttcattgccaataagctagaatttagaaactcatcttgttttgaagccttttggaataaaatttaattctttgaatctttttatgcatatcctgccctcagaactatgaggataaattgaatggatttattttattgacacaaaattaatttttatgtatcagattatataaagcctttatttatcttttgctttatacacaatgtcaattcctatccccaagttacctctgcgacttgagatgtttttgcttctaggcaccaaaactggagtctcttaaaattcacacttgtaccagagccaggcatcacagatcacatactaacttttcagcatctggattccttatatatcttttctctcaccatgaacagttaagtgtagcagttcaaagttccagctctggaggcagagtcctgactctgttaggcaggttcttaatctcaactataaaatgaagttacaaacattgagtgcctcatagggccagtgttaagattaaatgaaataaatataaaccatttggcatggttcctggagcgtggttaagtgctcagtacgatgatgtccctgagatcagagatgtgccttagatatctttttgattcagtaccatcacataacctcagagagcaggggatccccaacccctagtaccagtcagtggcctgttgggaacggggccacacagcaggaggtaagtggtggcaaaagagcattaccacctgagctccgcctcctgtcagatcagtggcagccccagattctcataggagtggaaccctattgtgaactgtacatggaagcgatctaggttgcacgctccttatgagaatctaactaatacctgatgatctgaggtggaacaattttatcctaaaaaccactttcctcttccccgctcaaccccacccccaaccctggtctgtggaaaaattatcttccacaaaaccagttcctagtgccaaaaggttgaggaccactgttagagagagtaaattctcagtaaataattgttcagtaaataagcgaacccacagagtagttaatacaaaacaaagatgaagatgaggcaatccaacaactagccatgctgtcaaactgtacttggcggtttgcttttgtttatctctttagtgattatccccaaacatttgccacagggttcctaaggacatccttcatcacattgctgagataattctctccatttcaacatatctcaaccttttttggaaaaaagaaaaaaaagtcttttttgtccttctctccaatctccgtgagaaatgcttaatgataatgggcctaaatggcttataaagatagttaaaacttcctactggatcttcatcattgacagtgaagatgtatttaaggcacttggattaatgctttactttattaaattcttactgtacctataatgaggaaatagatgttatccttttttttcatgaggaaactgaagcttcaaaagttgtcaagcgtcatgaaagatactaaatagtccagttgttataactcgtaatctgtttctgtttataacagagtcctctccgttattgtcttatttcagaaacagaataattatcttgatatgaggcagcattaattaataggttttctttagtaagtagataaaacaaatctaatggagaatttttaaaattcctttacagagccagtacaaccttcttttttcttgacactttcttttaaatatggacttgctttgttgccttcccttacgttcctactactatattaaatcagcattgtgaacgaccactgttgatgaccttattctcatcttcttgaagcatttttaggatatcattgcctcaggacatgtctgggcttctacccctaggattccctgcattctctttcttctttctcctctattacaacatttctactgatgctgcctgagtcatctacctgaaacactgatttttgtctttccattcgagctttttaacctagcattcaatatgtcattttcactcacagccagtgaaaactagtcttctgatatttccagcttgttctctcaattagcaagctagaaaatcctcattaacaattccttcctaaagtgttttctccttcataaaatatctactttattttttttcttccctttacctagctctttctgtcctttattatctggcccaattctcatttccttctttttttttttcttttaagatggagtctcgctctcgctctgtcacccagcctggagtgcagtggtgcgatcttggctcactgcagcctccgcctcccaggttcaagtgattcttctgcctcaacctcccaagtagttggtattacaggcgtgtccaccatgcctggctaactttttatatttttagtagagaccaggtttcaccgtgtaagccaggatggtctctatctcctgaactcgtgatctgcccacctcggcctcccaaagtgcggggattacaggcgtgagccaccacccccggccctcatttccttctaaaggcattcctcgactaatccagttcctctgacctcatgtacctaaactattcccctttctggtctctaatcaaccctagtacttgctttatcacttcgtttttaaatgtattgtccctgcaactagattttgattctgtagaaggcaataactgtgtttcgtgcttcatttgtacctaacacagaatttactggacatcaactagatatttagttatagcgaaatgttttttttttttttgagacagggtttcactctgtcaccaaggttaaagttcagtggctctgtcacagctcactgtagccttgacctgctgggctcaagcgatcctccctcctcagcatctcaagtatctgggactacaggcatgtgccaccatgcctggctgatttttttgtagagaccaggtctcattctgttgcccaggctggtcttgaactcctgggctcaagcggtcctcctgctttagcctcccaattgctgggattccaggtatgaactaccatgcccaggctttttttttttgaaagagggtcttaaatctattgcccaggctggagtgcagtggcacaatgatggctcgctgaagcttcaacctcctgggctcccacctcagccttccaagtagctgggactataggcatggaccactatacctggctaatttgttaatttttttttgtttttttttgtttttttttgagatggagtctcactgtgtcgccctggctggagtacagtgacgcgatctcagctcactgcaacctccgcctcctgggttcaagcgattctcctgcctcagcctcccgagtagttgggactacaggcatgccccaccatgcccggctaattttttgtatttttagtagagacggggtttcaccacattgaccaggctactctggaactccgggcctcaagtgatctgccctccttggcctcccaaagtgctgggattacaggcgtgagccactgctcctgggcctaaaaattttttagaggcagtgttgcccaaactcctggcctcctgcagtcctcctgccttggcctcccaaagtgttgggattacaggcatgagctcctgtagcttatccaataaatgattttgtgtgtgtgtgtgtgtgtgtgtgtgtgtgtgtgtgtgtaatttttctttttttggagacagggtctcactgttacccatgctggagtgcagaggcatgatctcagctcactgaaggcttgacctcccaggctcaagcgatcttcctgcctcagccccacaagtagctaggactacaggtgcttactacacacccagctaatttttgtattttttatagtgatggggtttcgccatgttgctcaggctggtctcgaaacccctgagctcaagcaatctgccctcctctgccttccaaagagctgggattataggcatgagccactgcacccggcctcatttcattctttcagcagtgtctttcacagagcagttgtttttatttttattttattttattttattttattttcattattattattttttgagacagggtctcactttgttgcccaggctggagtgcagtggcacaatcacagctcactgtaacctcagcctcccctggctcaggcagtcctccctcctaaacctcccaagtagctggaactacaggtgcgtgccaccgtgctcagctgatttttgtattttttgtagggacagggttttgccatgttgcccaggctggtcttgaactcctgggctcaaacagtgcacccaccccagcctcttaaagtgctgggattataggcatgagccaccatacctagcctgtttttaattttgataatattgaattagtcaaccttttctttcatgattgtgcttttgctgtcatatctaagaaatacttgcgtaaacccaagaaaacaacacttttctactatgttgtcttttagaagtttatagttttaggtttcacatttagctttgtgatccagtttttgttgagttttgtacaaggtgcaagataataggtcagggttctttttctcccctttcttgtggatgtccagttgttccagcaccatttgttgaaaagattatcctttctccattgaaatgttttggcatctttgttgaaaatcagttcatcgtatatgtgtgcatctatttctagactctacattcttcttcatctagctatgtgtctgtcctctggccaacaccactctgtctttatatagaaagttttgaaatctggttgtgtgaattcaattctccaactttttgtttttcttcaaaattatttaggctcttctagggttttgtatttgtgtgtgtgtgttcatataaattttagaatcagctccttgttttctacccaaaacaaaaaacaaaaggccctattaggatttggattatgatgatatatctgcagatcactttggggaaaactgacatcttaacaataatgaatcttctaatacaagaacatgatatatatcttcatttatttaagccctctttgatttccttcatcagtgatttatagttttcatatttttttccatcttttttgttttgagacagagtctcactctgttgcgcaagctgcagtgcagtggtgcgatctcagctcattgcaaccgctgcctcccaggttcaagtgtttcttctgcctcagcctcccgagtagctgggattacaggcatgcaccaccacacccagctaatttttctatttttagtacagatggggttttgccatgtcggccaggctggtctcgaacctctggcctcaagtgatccacccaacctcggtctcccaagttgagattaaaggtgtgagccaccacgcctgaccttttgctagtttttggctaaatattttgtagattttggtgctgctgtaaatggtacttaaaaaaattaatttctggttatttattgctaatacatagaaaagcagttgatgtttgcattttgacattgtatcctacaattgctagactgacttattctggtctttttgcagattccttatgattgtctatgtagacaattatatcttctctgcatagagttttatttcttcctttacaatctacgtaccttttattgctttttctttgctttatttcattgattaggacctctggtatgatactgaatgggaatggtgaaaagaaacattttttgcattattctcaatcttaggggcaaaaatcattttgcctttcacctttaagtggagttgtatatctccttttactagtctaggaagatctcttctattcctgttttttttttttagagtttttacaacattattttaaaagactcctgcctagtgtttcataccattatttatattataccataatttagacaaatttctatttttttacatcaaagttattttctgtaatgagttatgtggctaaagtatttttacgtatctctaaatataaatacatttctaaaagtgtaattactggttcaaaggttacatacacagttttaaagcttttgatacacgttgtcaaattgcccttagaaatgttaacagataatgctcccaccagctaagtgtgtatatacctatttctagaattctcctcagtagtgaaaagaaggtaatttttgactatttgttaaaatagattagtttaattatttctgtcactagttcacagtccttgttaataatttgagaagttgaacttatatattatttttaaaattaatcattacagaaagcaccatattgtcacagttactctaatgcttttttcttttttgtggcccttctaggagctttttagaaaagttcgaagtatcttaaataaattgacaccacagatgttcaatcaactgatgaagcaagtgtcaggacttactgttgacacagaggagcggctgaaaggagttattgacctggtctttgagaaggctattgatgaacccagtttctctgtggcttacgcaaacatgtgtcgatgtctagtaacggtaagaagagaggaaggagtaaaacgagaaatcttcaagaggtatattctcccctcactacacattcttcccagaagtgttattggggcaacataaaggggagaatatatttttagtatttattgatataatattctcattattaaagacaatcttgctttattaaaacgtatactcccctctggaggggatatgaagtctggactgaaatgggcatgagatgggcccattcagcgtaagaaagatagagtcaggtttaaattagtaatgtaaaattatcgtcatgggcaacaaatttttcccgtgtgtctcttatggaaagcaagcaaatgcgtgctttcacatttaattaagtttgaaatttaaaaacacgttgattctaattctaatctctgtgaaaatgaaaggatagttgttctgtagtcaaaaaggtttcaaagctgataatttcatgtcatagaaactgttaggtttctctccgtttacattatctgaagccatttaatctccacagcctgtcaaacctagggcaagacagagagggagaccaaagagcttctggttagtgttcattgtcctctattccacagtcataaactgccatgtatcatctgttttctcttcctgttattgttaccgaggtacttgtgtcagaaatgtctgtcctttaacatttggattttttcttaattattacaactcattgtcgtgccttgctgcttagaaacaagctatgaaaatgcaaaattctctcattctaccaatatttttgactacctatgtcaaaggtaggtaagtcttttggggtttggaaaagtcacatcttctgtcttaaaggaattcaaaatccatttgaaaataagtatttccaagaaaaaaattacttaaaaggtattttgtgatgtagcagtatctcaatgcctgaatggatggttagaccgaaaaataagttggaagaaaaagaaaacactatgttggtgggagagtcacaaaacttttataaagcaaatagagtttgagttggacctgacacaatggggaatacacatttggagaagaaagaacacattctaagcaggctcaagtctgaagcagtaagtgtggctttggagtcacagctctaggtttaaaatttaaagtttaaaattaaattccaggctgggcaaggtggcttatgcctgtaatctcagcactttgggaggctgaggtgggcagatcacctgagatcaggagtttgagaccagcctgggcaacatggggaaacttcgtctctactaaaaatacaaaaattagctgggtgtggtaacaaaaattagccaggcatggtagcgtgcgcctgtaatcccagctacttgagaggctgaggcaggagaatcacttgaactcaggaggctgaggttgcagtgagcagagattgcaccacaacactccagcctgggcgacaagagtgagactctgtctcaaaataaaataaaattgagataagagaagatagtttctactctgccacttcctaactttatgaccttagaatagttactgatctctttaagcccctgtttttaatccataaaatgagattaattcataccacttgtaatattataaggataaaattaattaaaataaatgagattacaaaatttctagcccagtgtttggcctgtagtaagccctaaataaattgaaactatgttagaccttttaggtccaatttgtgaaggttttgaatgttggctatagaatgaggatgattattataataaaaatagtctattcagcacctactaagttgcaatatggatagaggctttatatatacatattatttttaatggttattctaatcctgaatggtcagtgttactagccccactttattgaaccaaaagctgagcttgaaaaggaaaaataacttctcagggtgatgtaactagtaagtggcattgctagaattcaaatcagggattatttaactcaatcacttgccatagtgcctcctgatgtgccatagttatatggaagcaaactaattctccatttctgggctctcattttcattgtggtagccatgacatccatgactcattaaaattaggactagatcccagatcctctggatcacactttaatgctctttcccagttttgaattttatcagataggcagttaagtggtgtttaggtagtttaatggaggagtgatattgatgaaaatggcctttgaaatgatctggcaataagtacaaattggattggaatatgaagaaattatagacaagccacccacttatgagacttttgaaaactttattggattgttttatttatgtattttgcttgagacaaggtcttttgctctgttgcccaggctggagtccagtagcatgatcatagctcactgaggcttcaaactcctgggctcaagcagtcctcctccttgactataggcacacaccaccaccaggcctggctatttttttatttttggtagagatgaggtcttactatttgcccagattggtctcaaaaactcctaggctcaagtgctcttcccgccttggcctcccaaagtgcagggattacaggcaggagccacctcctggcctcctggattattttaaattataagataacaacctatttgaacaagtcaaatggtatagttaatacagttattactctctgcttgcagccccagccagttaatcttccttccctatcagatggtcactgtgaatggttttgatgtaatcatctatagttttcttcatgtttataaaatcacatgaaaatatgagtatgtataaagaggtttttttggttttgctttaattgaattatataaattattttcagtttgtttttttttttttttttacttaataaatgttttgggcagccgtctaggtcattacagatagattttactcatacttttatactaattgcataatatttcataatatgcatataccataacttgttcaaccatctctcttctctctctatctctctctctcatatgttcatttatccttgtattctggagcctgcctccctccctccttgtctttttttttttttttttttttttttttgagacaggctctcactctatatcccaggctggagtacagtggtgtgatcacagctcactgcagcttcaaactcctgggtccaagcaatcctctcatctctgcctcccaagtagctgggactacaggcacatgctcagctaatttttgtatttttttgtacatgtagggttttggggtttcgccatgttgtccaggctgatctggaactcctgagctcaagtgatctgcttgcctcagccttccaaagtgttggcaccatagacgtgagccaccatgcctggcctctttcttcttttccttccccttccctttcctttttgtcttgctctgtcacccaggctagagtgcagtggcaggatctgggcttactgcaccctcaaccttctgaggtcacatgatcctcccacctcagcttcctgagtagctgggaccataaacatgcaccaccatgtccagttaatctttaaattttttatagagacagaatctcaatatgttgcccagactggtcgtaaactcctgggctcaagcaatcttcctgcctccttcccagagtgctgggattataggcgttagccattgcacctgacttttatttctttagtgtatgtttttaatgttttaaacttttttattgaaatatgactaacatatgtgctttctgggttgaaattcttcatttgttgcatttgccaaatttaatgatgtaaatgctgtcctcaggactatttgtaatctactgacagtttgacaagactcacaaaattactgttaaacagttgtctgtcataaaccaatatgaaccagcttcaacacaccaatgcaacatgcttacagaaaggtatacaaatcattactgtacagctcattgtatgtcagtgaagtgaatacaccttagacccttttcaatactctttagtcttttttaaaggtaactaggaccaggtgcagtggctcatgcctacagtgtcaacactttggaaagctgaggcaggaggatcgcttgagcctaggagtttgaggccagactgggcaacataatgagactctgactctacaaataaaaaattaaaaaatgagccaggcatgatagtagtccacctgtagtcccagctactagggaggctcaggtgggaggatcccttgagtccaggaggtcacggctgcagtggaccatgataatactatggtacttactccagcctggtgacagagtgagacctagtctcagggaaagcaaaaaaggtaaccactgtcctgacttctgacactgtagttgattacttttgagggattgagagactgaaataaaatggtaacagtgaacatagaaacatagaatcctactacacacatcaaacattatgggattattaaatatctaaatttgaaaagctaaccttttataagaatatcaaggaggctattttcatgaacttttgagtagggaaagatttctttagcaaaattcaaaacatgaaggataaaggtataagatttgactgttaaaatttataatctttgatgcagcaaaagatactataaataaatacaaagataaaaccacaacctaggagtatctgtttggagtgcattaactgacagaatattagaatccaggattaaggaagaaaaagaagcaaatcagtaggaaaaaaacagcctaataaaaatatgggcagttcatagaaatgaaaatccactgggtgataaactttagaaaagataatcaatgacagcacttctcaaaataagacatttacgcggccaacaaatatatgaaaaaaagttcaacatcactgatcatcggagaaatgcaaatcaaaaccacaatgagataccatctcatgccagtcagaatggcgattattaaaaaggaaacaatagatgctagcaaggctgtggagaaacagaatgcttttacactgttggtgggaacgtaagttggttcaacagtatgacgattcctcaaggatctagaaccagaagtaccatttgacccaacaatcccattactaggtgtataatcaaaagaatataaatcattctactataaagacacatgcacacgtgtgtttattgcagcactatttacaatagcaaagacatgaaaccaacccaaatgcccatcaatgatagactggataaagaaaatgtggtacatatacaccatggaatactatgcagccataaaaagaaatgagatcatgtccttttcagggacgtggatgaagctggaagccatcatcctcagcaaaataacactggaacagaaaactaagcactgcatgttctcactcataagtggtagtttcacattgagaacacatggacacagagaggggaacaacacacaccagggctttttgggggatgggggttgaggggagggaacttaaaggacaggtcagtaggtatagcaaaccaccatggcacatgtatacctatgtaacaaacctgcacatcctgcacctgtatctcgtggtttttttttttttttaaggaaaaaaaaaagacattcaatgttattcattattagggaagtgataaactaagaaaagataaaccatagttctgtaaaattcacccccactagattgaaaaaaaaatcccattttaaatgtttttaaagacgaatataaccatttatgagggcaattgggcaataatgttgaagatgttcatgtactatgcaataacatcaaattgctaaatgtaccagatatttacaaacgtgaaacaacaagaactctcgcatactgattgcaacagccactttggaaattgtttagcattatatactaaagctgaagtttttctgccataactagcatttcaattcttaggtatatacacaaccaataaacatacatatctcatatgctaggaaatatatacaaaaatgttgtagcattttttatacaggaaagaaaaatgaaaaaatgcctgttgatagtagaatggataaatcgtagcatgtttatacaaggacagtgaatctgaagtacaactacatgggcatggattctcacaagagtaagtttgagtaaaagagggcagacccaaaaagatactacatgatttgttatttaatgttcaaaaatgaaacaaaaactaactttggtgtttggggatacctgtctatagtgttaaaggttgcatgttttctttgtgaaacaaaagcaaggctgggcgcagtggctcacagctgtaattccagcactttgggaggccagggcaggcggattacctgaggtcaggagttcaaggccagcctggccaacatggtgaaaccccatctctactaaaaatacaaaaattagctgggcatggtggcgcatgcctgtaatcccagctacttgggaggctgaggcaggagaattgcttgaggcaggagaattgcttgaggcagggaggttgaggttgcagtgagctgagatcatgccactgcactccagcctggccgacagagtgaggctctgtctcaaaaaaaaaaaaaaaaaaaaaaaggcaagaaagttataaaagtctaggaggcttttgtataactttggagacaaggggttgtggatgtgctttggaaggaaatttaagtggagcttctgagaagctttcagtgttctgtatcttgacctggttaccatacctggtggtatttatggagtttgctttttcataatttattgctgaaccttaaaaaatttttgaaacaaaaacaagcaatagagtgaaaagcttaaaaaccactataggcttttaagttttactgtaatatttagtttcttaaaaactgaaaaagtggccagctgtggtggctcatgccaataatcccagttggggaggtcaagatggaaggatcacttgagcctaggagttggagaccagtctgggcaacatagtgagaccctgtctcaaaaaaaaaaaaagtgtgaaaaagctgggtgtggtggcatgcacctgtactcccagctactccaaaggctgaggcaagaggatcacttgagcccaggagttcaaggatgcagtgagctatgatggcactgttgcattctagcctgggtgacagagcaagaccccgtctctaatatatgtgtatacacacacacacacagattttttttttaagcaaaagatctaaaacaaatatggcaaaatggtaagatttgacacatttggacaatggatacctgagtgtgtgctatgttattttgtactgttggaaaagaaatgaattagctgggcatggtggcgcatgcctatcacgccagctacttgggaggctgaggcacgagaatcacttgaacccaggaggtggaggttgcagtaagccaagattgcaccactgcactccagtctgggtgacagagcgagaccctgtctcaaaaaaaaaagacagagaaaagaaaagaaatggagtctacccaattgctttttcaagatgacatgtccacgggccagtgttgcccaaaagtgaaatgcccaaaattgagctgttagtatgtgtttcagcaatgctggcataagcagatttgtttccttcaagcccctgtttactatgctaatgtttcctgtgaagtcagacaggaaagatctactgtatacaacattttccaaacctctagaccacaggcatttaaaagaattcccttaaggtaattattagcttgaaaaataatacctcccaacagaatcaaagaaactgaagacagtgaataaaaaattgaactagtatctgggagtctgatctcaaccagggacattccctcccacccccacttcaggacatttggcagtgtctggaggccttcttggttattggtatggcatcttagtgggtatggggtgaggatgctgctgagctttctatagtgcacaggagagccctccacaagaaataattatcctaccccaaatgtcagtagtgttgaggtttaaaaacccagcctagattgttgagattgtaagatttaggagaatatgtgttctcattgtttagagcagttgttaagccatttttctctttccatgtcattcacattgattgcacacctccatttaaaacctcttttgtaactttgcagtgattaggtgaatcctagagtataaaattattttgtttgttaattttttcttgaagtcttaaagggtaggcctttaagaaagattcttttagatttatagaggaaattgatataatggattcagctttccctcgttgctctgtagtactgtatacacacacatacagatacatatgtacatatccatccatatatgcagctgcctgtgtccaccaagctctactaaggcataccatacaaggcttgagggaatcataagacatggtcaactccacctctggagtattttgctgcttctgctagttcaactggaaatgactgaagaggcctgtgagactcccttcatgaataataaagcatttaactagaattcagcatttctttttggaggaggacatctgaattaagtggcaggtgaggaagagtggacaagagaaatgttgtcctgtatctaaatctgtacttaagtacaattttaaattggattattgaaactttaaattgctgtgcttttgtcttaattataattgaaatgagaatcctcatctcagaacccctctagaatataaactccaaggaaagggactttttctgttttgttcactgctgaattcccagtgcttagaatgattcttggcaggtaatagttgtgagtgagtaggtaaatgcctgaatgaaagaataaccaacttgaatgagtttcttttatgccctgagactgtagttttgttactttttgtctgtgctgtgggagacatacatacctcagctacaaagaatggcactaaaggcagatttttaagcattctgtatactgttatgccagatacagagcttgtagtattgccactttaagtgtttaaaagcaaagcatgaggagaatgacaggactgagaataggaagagacaccgagagaaaaagagaggcagttaaatcccataaaaaataaagcccggaattgcagacatgacaagtcagccttgggcaacagcgagtgaccggtcaactggaggaggagggatttgtaactgtcctgatggaagattttataatgtgttgaagaaaaaatgatcagagatgacttatactttcataactgaccactcccttttgaatcttgtgcatatcctttaacactatacctcttcaggtatatctaacagagatccattttgatagatgtgttcatagtatgcagagtattatgtacagttttggcaggttaaattgcctaaggtcacgatataaccactgatagaaaatagtatgtcaccatggacctgagagttatgttggtttattaaacaatttttttttaattaccatattgctgtttacttcactttttttttttttttttttttttgagacgtagtcttgctctttcacccaggctagagtgcagtggcacaatctcggctcactgcaagcttcgcctcccgggttcaagccattctcctgcctcagcctcccgaatagctgggactacaggcgcccgccaccacgcccagctaattttttgtatttttagtagagactgggtttcaccatgttagccaagatggtctcaatctcctgacctcgtgatccacccgcctcagcttcccaaagtgctgggattacaggcgtgagccactgcacccggcctatttacttcacatttaagagcaaactgtccttggccaggagtagtgacacatgcctataatcccagctactcaggagacaggtactcaggagacagatgggaggatcacttgagccccgaagtttgagactagccttggcaacatagggagacactgtctccaaaaaaaaaaaaaaaaaaaaaaaattttaaagtaaactatcctctagaaaccagagttttagagttagcacagaggtgccatttgcttacattatcctattcattacaaatactttacttcagactagcacatgatttgggggcaaaactactgctgggccatgggttgccattaacatctttatgttctgagacagcattgaaaatcctgaacatgccaagccaaggccaggacttaccattccattttcatttctgtttgattaccataattactacactgctgacaacccttgatgattctctagaatttgatccttttggggataagcatgtccaccctcaatactaacaaatatgtcagcagtataggccctgttgcttgaagaaaattactacctgatgctgacaacattcatatctaagattgctgagtgacctgtatgtggatgggtctctttacactaatgccacattgttagtttactactgtgtaaaaataaaaagctaggtgctttctagtgaattcagcttatcaagcagccttcctaaaacattctcaccgactcccttgctccctgagaaaaagaaacccgtcccgaacaacccatttaaacacacacattttagtgctgatcatggactgttaagtgaaaattgcagttgtctaaatagatccttttcccactgtcacatacctttcattcttgctattatccatgatcatatttgcatgcatctgccttgtccactgttgtgtctctgaaaaatcatagtttgaagccctgactcttactataattacattaggaggtgggtggggggcagtaactaggtttagttgaggtcatgagggtggagcccacacaatgggattagtgcccttggaagaggaaacacctgagctgtttctctccctgtcatgtaaggatacagtgagaagtcagccatttacgagccaggaagagggtcctcaccaagaacttaatctgccagtacattgattttggacttcgcagctttcagtactatgagaaataaacttccattgtttaagccacccagtctatggtattttgttatagcagcccaagcagattaaggtatccactcttcatgttctgttccaactaaccaatctcagtgggtctcttgaccacccagtgtccagcagacaacaagtgctcacttacagccctgtcaaatttaccatcccctaaggacaaaaaaaaaaaaaaaagaaaatcaccatgaatcactattctcagaggatatgttctcactggcccctttccatatttccacagccctgttaaccatccccagagggtattaagatcatattccaaaacaagtcttcaaggagctgtatagctaggtattcattcattcagagatacatttttgtaaatctgtagtcattctgctagttattcagttttaatacttccatgtgaatatatctgaaaagtttatgcatgattacatgttctttatgccccaattcatgtgaaattcctcttgaccattattttgggatagcagacttttgtttctcttgcattttgtgattttctctttattgcttagtgagctaactttgctttatcctttctttgatagctatgttattacaatatacgttactcttaatgtttaatcataggcctgtcaaatgaagtgtttaatatagccatactagttgtttattgggcccttactgtgtgtcagccactatttgcttttccttagatacctcatttgatcctcccaataacacctcctaagagataggtataatacctcaccccatttttgaaatagaggtttggggaaactgagtgacttggccaaagtcacatggcagagctgggattgtgactatgtccagagctcccttttcaccagctattttatcatgttccttaatctacagtcattttggaatatctcattctgcaggtgtaggggctgaggttcagtgaggtaacttgctcaaatttacatagtagattaaagagctgggattcagtttctgattttgtgactcatattccagcactctttcgatttcagttacagcttatttatctgtggcttattaaagtgcttccatgctgaatgctcaagctgccctctcagatggacatagaggctgtacctcccttgttttagatgacaaaactgaaacttggattaaaagaattgcctttgtttatatagcaagtaagcaaaacttttgatacttaacccagctcttctaaaatagtcttccctgcacttctcaccatatggcagtggcttagattttcatattgtttgttgtcctcatttctctcttttctacacagtaaatctgtaatgtaggaaacttctctttagagatgatagattgtgggccggactattattttcttgtcagtcagttatacacttaatgtcaatacagatgatggaggtaaatatgccaagatgctggctaggattttgtggctggtttaacttatgttcctataaagcagcaaattggatataactgctgatgtttagaacctttagttctaaaatctaatgtcatgttggtgctcttgtatgccaacctgcttttgaatatacttcttggttctcttttgtatttcttagtccattattgtgtattctgggtcttatataagagaaggtagaatcaacttttggcttttgctttggaaaactcttgctttcatgtagcatttcttttcttgaaggctgacttgtgtgactttagaataggcctgactgtgaaattatctatagttgcttgcatttatgtagcctaaatttggagttaaggatacagtagccttttctctggttgtctaaaaaattatctgaaaatgttcccctcttcctaagataatgtctcctgctgaaaggaaatatgcagtgtaacacatggttgattattactggatctgttaaatgatctttcatacatcgtagggaatacattggagagtgtgccatcagttctagtacaaatattctagcatcatcatcgtcagttctcaggaagtttctctagccatccagccttgatcaacagctgaccaagtgcattctggttgataacattaattattttgtgagtatggatgcagtgtacccagttttcacaaagatcttctgttatacctagggcaaagaccatacatacatttcagaactttgggagccactttgtcatcccagaaaaactgttgtatcatattatgaaatagctgttcaaaatggtgctcagagggatgtcatctgtaaattagaatattttagtagaatccctgctgcagtctactgtctttatattctaaatatgttcataagaatgtctctgtgtttggttacaagtaaccttgagctattacaactattagaaaacaattattattggatttggatggaaaccttgtaaggatcttgcttccaaacttttggagaactagtatattctcatggcacataagcaataagcagtaaacatactatatttatagtcaaggtaagtgctaacattatgacattccccaatgaaaagatatctcaaaaatcccccagtatcccaacttctgcataaatacaataaggatctcacctacaacagttttgcgataaccagcaaattctcccttgtcttatgtcatttttgtgtgttctattaaaccaaaatacttattacaacggtacttcttaaaaaaagaagtaataactctacacagttttttttttttttaaataaggtctagataagttcagagttatagttgcaatgatatgacaagggtttccatgttagctagtagcatggctaaaaaagagtacatttatatgagaggaatgtgtgtcttttctaaataaaatttaagacatattactgttgaatcatgaaatgcctgaagctatattgtttgcctcttatagaatgcttacctgtggttcagtcagcattatttcatacaataaagcaaacagatatttttaatgtctttaagtaatcttgttgattttttttattttcctgtctggatgtagctgaaagtacccatggcagacaagcctggtaacacagtgaatttccggaagctgctactgaaccgttgccagaaggagtttgaaaaagataaagcagatgatgatgtctttgagaagaagcagaaagaacttgaggctgccagtgctgtaagtattttcatagaaagacagtgcttgtacactttgagcactgtaaagtagaaatttcaggaagctagatacagcatctccctgctaccttaagagggacctatggcctttttttttccatgtagaaacaacatattaatgtttaggggaatgctttgttccttttagtgcctaatataggggacagctaaattttccatgccagccattcaatctaagcctgagtcaggtcactgagttccaaaaatctgaaatggatgggtatagttcagttttctgagcagtagattctacacttgctatcagattctcacggggattctgaccccatgaatctcagtgtttattgtgcagtacaactttcatcatcaagatgctattattcctccttacacaacagccagaggagaggacaaggcttcatgatgaactggaagaagccaaggacaaagcccggcggagatccattggcaacatcaagtttattggagaactctttaaactcaaaatgctgactgaagccatcatgcatgactgtgtggtgaagctgctaaagaaccatgatgaagaatccctggagtgcctgtgtcgcctgctcaccaccattggcaaagacttggactttgaaaaagcaaaggtaaaaatccaaaagctcagaaaccttcgcaaaggctccttgtcagttgcaaaagaacttagactgtcaacagaatagttctatcttttcccaaaggtctgggctgtttatttttcttcttttgcccgtctcattgtcagtgttcaaccatcgtgctccttacatttccatcagagtcagagatgaggagggtcccaaattgtgtaaaagccagtttgtagattcttcagattatttgtcccatattcttttttcttcttctgtaaccatttcccaatttgggaacagaaatatgcaaagaaaaactatggcctaagggtagtgcagaaatgaagacccagtagtgcttctagagtttatactctaattgatgacacagccatctaaccataatataagaaatcattaaaaatactgtaataatgtatgctatttaaggggtatagaaattagaaatgcttcaaagaaataatgtcagaaacgctccataacatctgattcagctaggattatgcttagctgtgacagaaaacccagtggtttatacaagattgaggtttacttcttatttatgtaaacaaagctctgaggtaagtcctttcagcttaacattctgtgactcctaaagtttaacccttgtcctaattattctcaccagagaaggtaggaaaaggggcaaaagacacagccacctctctctctctctcttttttttttttaagtaacagggtcagccgggcacggtggctcatgcttgtaatcccagcactttgggaggctgaggcgggcagatcacctgaggtcaggagttcgtgaccagcctgaccaacatggagaaatcccgtctctactaaaaatacagaattagccaggcatggtggcgcatgcctgtaatcccagctacttgggaggctgaggcaggagaattgcttgaacccgggaggcagaggttgcagtgagccaagattgcgccatcgcactccaggctgggcaacaagagtgaaactccatctgaaaaaaaaaaaaaaaggaaaaaaaaaaaaaaggtaacagggtcttgccctgtcacccaattttttttttttttttttttttttactttttgtagagatgatgggtctcacttagttgcctaggctggtcttaaactcctggcttcaagcagtccttttgccttggcctccctaattgctaggattacaggtatcagtcactatgcctggcccctctggtctctttaggaaggccctaggaagctatagcataacatttccatttatattattgcctatcattaatcacgtgaccaaagccagctgccaggagcctagaaaaatgtagtctttattttaggtggtcatatgaacaactaaaaattctaccatatggccgggcacagtggctcacacctataatcctaatactttgggaggctgaggcagaaggattgtttgagctcagcagtttgagaccagcctgggtaacatagtgagatttcctatgtccaaaaaatcatacacacagaaaaatttagctgggtgtagtggcatatgcctgtctgtggtcccagctacttgggaagctgaggcaggaggatcacttaagcccaggagattgaggctgcaatgaggcataattgagccattgcactcccaactgggtgacagaacaagaccctgtctcaaaaaaatacaaataaaaattctaccacattatattttggctataaattgatattcctagaccatttagaaaactacatgggctggacgcagtggctaatgcctgaaattccagcacgttgagaggccaaggctggaggattgcttgagcccaggagttcaagaccagcctgagcaacataatgagaccctgtctctacaaaaaattaaaagattagccaggcacggtggcacgtgcctgtagtcccagctactcgagaggctgaggtgggatcggttgagcctgagaggttgaagctgcagtgagccgtgattgtgctactgcactccagcctgggcaacggagtgaaaccccatctctaaaaaaataaatagataactacataaataaataactgtaaattggtaaaattacgtttaagtttctcagacaggagtactaatgattttgtctcttgcagccacgtatggaccagtactttaatcagatggagaaaattgtgaaagaaagaaaaacctcatctaggattcggttcatgcttcaagatgttatagacctaaggctggtgagtgggaaaaaaaataataataagcctgctggtccagtctctttaaaggaattgggttggggaaggatgtcctgttgtttacatgtgtaaagatagtgcttttgcttcaggactcagaatttggattggcaaactttccgtgggagagttctgagaagggacaaaaggcctattgccagttacgtgcttcttctccttattctgattatcaaaccatattgcaattttgtttgcgctttgtttttttttttgagatagagtctcactctgtcgcccaggctggagtgcagtggctcaatctcggctcactgcagcctccgcctcccaggttcagatgattcttctgcctcagcctctggaatagctgggattacaggcacatgcccccacacctgggcaatttttgtatttttagtagagacaggatttcacgctgttggccaggctggtctggaactcctgacctcaaatgatctgcccacctcagcctcccaaagtgctgggattacaggcgtgagccaccacgcccagccacttgcaatttgtaatcagccattctgaattcaaactccattcaaatgtaaattcaattaaatttagtctttgtgagctaaataatcagcaagtctcatctccacagtaaatacctttaactctctgagccttacatttttaatctctaaaatgaggatgttgcctaccttgcagatttgttgaagagtcaatggaataattacgtaaggtgcccagctcagatattggtgttttcttctctttcgtttttcctgtgaccctcctattctgctgctgggttttttttgtttttttgtttttttgtttttctcatttctcttaccgggtgcagtttttgttactactacttttctctgttttaagtttaactcctacagggagttactcttttgtaagtttcactcctacagggaatatactacatcaagccctacactagagaaagtgaacaaagccctacctcttatttctcctccacccaggccagatagcattgatgatgattctttatcttgctaagactagatgtggttgtcttcacccatgttatcaaccacttatatcagatgttgggactgttgctagaaagagaagggagaagtataaagtgacaacttattttgtccttaatacaggggataaccaaagggcagagtggtatggacctttgtgtagaatatcagaaccatgatattggagaaataaaagcatgagtcatccttgacttagaacccctatggaatgtgatatgatctgagtagtaatcccacagattaaggcaaggccaaggaatcctcatcatttttatttttctctcctcctttcaaatgtacaaaatactgatacagataaaatccatttagtccacagagaaatatatgccatgcttaaaaatataataataaatttgggccagtctttcaccctgttctttgtatccattggctattggaatatgtagtatacaattggccagttttgactgagaagattttaatccttcagctctaatcctaaactgctcatagtgtcatctataagatacatgagaaactgccataatacagcttttgtaggtattttgtacttttccagtagtaaaaattgctaatttttaaattttaaaaaatgttcagtttatctggcagataaccttattttctgcttttatagtgcaattgggtatctcgaagagcagatcaagggcctaaaactatcgaacagattcacaaagaggctaaaatagaagaacaagaagagcaaaggaaggtccagcaactcatgaccaaagagaagagaagaccaggtgaggccggaatccaccagggtttagagaacttggaagtttcaggaatacatattaagaattatgtatttaggtataaaatgagatcagaaagaacagcccaaagaatagagtggtgattgttaggtgaagcagtttcacctgaagagtaaagttactgagtaaaagtagagaatgcaggaacaaagcatgatttctttcactacttaaaagccagtaagcaataagactttattgagcatcttctatatactcagaattggtgagacgagaaaaggaagtggaaaatgtagttacttccctctcaaagtgtacagtttatctggtaaggtaaaacttttgacaagcaaaagaggaacatttgttaagcaaatggaagatagtatatcaattatgaaatgtgttctccattaactgttaaaatttagagaaaaagaagagagacagaaagctgaaagaaaactttatttaagaaaggggcactttgtagcaggccggacgcagtggctcatgcctgtaatcccagcacttcgggaggctgaggtgggtggatcaattgaggtcaggagtttgagaccagcctgaccaacatgatgaaaccccgtctctactaaaaaatttgctggacatagtgatgtgtgcctgtagtcccagctattcaggaggttgaggcagaagaatcacttgaacctgggaggtggaggttgcggtgagccgcgatcgcgccactgcactccagcctggggaacagagtgagactacatctcaaaacaaaacaaaacaaaaatagagacatgcaaaaaaagtgaaagatgaagtagaaggcattttaaacctgagacgatagtccatttactaagtttaggaacgttggaaaagaaaacctttttcagagggaaatgataattttctggctgatagtaaatactcagtaaccattagttattgtcacagacacagtagagctcatagtgaagttgttaggagagatgaattctgcatggaagaaagtttacttttaagtttcttgagataccacacttaccttcctcgctctagtacctagtgcagtgccttttgggtaataacttttatttattattgaaccagattgagagggaaaaggagaagataccaaagcctaattcatggaggatattcacatatgactaaaggaagaaaagaactcttggaaaagtgccagacaagtggagagaaaggactaagatacaagtgtcatagagacaaggaagaagcaagtctgtttatgatcagtaatatcagatagcacggagaaaatcaagacgttatgttaggaccagaaaagcttttggatagacagttcggtgatctttcaatttattaattcattcagcaagtatttttttttgagatgagtctcgctctgtcgcccaggctggagtgcagtagcgcgatctcggctcactgcaacctccgcctcccggattcaagcagttctctgcctcagcctcccgagtggctgggattacaggcgcccaccaccacgcctggctaatttttttgtatttttagtagagacagggtttcaccatcttggccaggctggtgttgaactcctgaccttgtgatccacctgcctcggcctcccaaagtgctgggattacaggcgtgagccaccgcacacggccctcattcagcaagtatttattgtctgtcacttaacaaggcactcaaagtcccttccatcatgcggcttacatcttatggtagaggggagagaggagacaataaataataaatacttaaataaaatatatcatttgtcaaataaatttgtagaaaaacaaagaagggagaagggactagggagtgcaaatcttggtgagtagggtgcagttttaaacaggaaaactggggaaactataaaagttggtattgtttgagcaaagacctgaagcaagtgagggtgttaaatcatgtggaaatctggggaaagagacttttaggcaaagggagtagtaagtacaaagaccctgaagcagcattttcaaggaatagcaagggggccagtgcagctgaacctaagaagggcctgacggggagagtggtagaagatggggacttagaggcagcaggagccagattatttagaggccatttgtaaggaatcttctctttttctctgaatgagacagaaaggtatcagaagtgttttgaacaaaaaagtgacgaattttgtactttactaggatcacactggctgccatgatgagcacagctgaaggtagaagcaggaaggccaaaacacgtctctgcagtaatctaggaaaggggtgttggtggcttaaacaaaactgctaatgttggtagtagattctgaatgtattgtataggtttaactggcaaggtttactgacaaaaattggatgtgaagtgtgaaagaggagtcaaggttttccacctgtgcagctgaaatgttggagaagcagatttgggaaataaagcatacttctgtcatttgatcccattaaatacaatatactttagaataaataatttccatctgacttctccgaaagtgttctagtcattaattctgtgaatactggatttagccctgccttctccagcaccaggtattcatttgtgtcagttgtttgtttctaggtcagtaatgtttcatgggtgatccaaaataagcagtgcttctgctgatacagggtgcttctgctgatacagggtgcttctgcttatattttcctgccatgggattaaagatattgtcatcaatgctttaacatcttctgttgtctttctccttggttttgatgaaaatattgctcactctttcaatgtaaaactgacttgagacagatgagagactcccactctgttctccctgcaggtgtccagagagtggacgaaggtgggtggaacactgtacaaggggccaagaacagtcgggtactggacccctcaaaattcctaaaaatcactaaggtgagtctgacatttaaagtacaatttacgctctcctttgatgcctttgatattaaaacacacacacacacacacaatttacaatagttgcaaaacgtgtctcaaaagtacttattaaagtaaaacagcaatattgcaaatccatggggtggttattttttaatgcatttttcttcaagttactattgatcaatgtattctacaaactcatttctacattttctttttttttttttttttgagatggagtctcactctgtcgcccaggctggagtgcagtggcacgatcttggctcactgcaggctccacctcccgagttcacaacattctcatgcctcagcctcccaagtagctgggactacaggtgcccgtcaccacacccggctaattttttgtattttttagtagagacggggtttcaccgtgttagccaggatggtctcgatctcctgaccttgtgatccacccacctcggcctcccaaagtgctgggattacaggcgtgagccaccgcgcccggcctcatttctacttctataaggatttactaaagaggaaaagactaggttacttcttagacataagatgcttaatatacaagaggtaataacaaagatattttagaagcctaagtcaattgcaggcttttacacaatgtatccgtagctctggggaaaaaagcaatcacctgtttaaacctaaccatgaaagatttgccttatccaaggcgtaaaggaaaccacagagggcctactagaaatcattctgtaataaggatttaagagactctgtctgctttcctctctttttgagagtctgtgggcagtaagaggaaaaaactttctgtagcaggtattttcagcagtaaaagttgatcattgtaaggaggatgaagaactttggagaatgtagagaaagcagaattaaatatgataagagtggaaacttctaaagtccagtgggttttccaaatcatttgcaagtctagtttgatccttatacttcccatagttctgaaaatcggcaccctgctagcaaaatactgaagacaatcaaaactaatgtgaaaatactacatgaaagaagataactgacaagaagtattaagaaaagtctttaagaaaattggaataaaatgggctatgtcatttgcatcttcacagttttgtcaaagctttgcttcatgatagaaaattctccttctgaatctctcttaataatgtaattagctaggatccttttctccaagattctggtactttcttctagttgtttatatctcagagtaggaattccattgctgaatacaatttgagtcttacccatctccatttccatctagagacagttttaactaaaagtttatgtttaaagaagtcctccagcattttgaaaaatgtgtcggtatttaataacaacatttgtatttttaaatattatgctttccgtgcttggatactataaaaacagtgctggtatcaaacctccaacattactaccttaatatttttaagtatgtaaattgctaataaactttgtgtattcagatagttatactggaggtactatacatgggtatcctagaacaaaaccgttatacatatttattgttaattgggagtggtttgtgtgaaagcatattacatagcatagcaacatatatattatgagctgtcagaccatagaaataccttttttacaaagcgctacattacagcttttatgttatatgtattttataataatatgcattacagcgtaattttatttcacttgtagtaaagttgtgcttggaagattaaacatgagatatcaggcaccttaacttcctgtgctccctgcctaacattccaatctctttcttcttattctttattgaatactcacatcccactgcctgtctctagccaacatgaaatttttatgtctgttgatctgttttctgacagtcatgtaaagacactaatgaattaattttgtagtatttgtattttttatttttaaaattaatgggtattgtacaagaagaatgattagaaactgcttattacagttagcaaattcataaaccatcttaaacaggaggacctggatgcattctctagaccaaacagttttttgtggaaactggagtccagggaagtgcttcaggggccacatggatcccagtttaatgagaacagctccaatttctgtttctattaaattggcattccaaacaaatttttgttgctaaaattggttctacttcactgaagaagaaaaaaataaaagaaaaactattcttctagaatatttcctataattgacttgtggtcccttatgttacagcctacaattgatgaaaaaattcagctggtacctaaagcacagctaggcagctggggaaaaggcagcagtggtggagcaaaggcaagtgagactggtaagtgtgtgtgtcccttctcaaacctggctgtggcttgttagcatttgccttacagcgcattcccatagtcatcgaatgatggtttttgggaaagatgtgtagactaatcatgcctaaaattttattggtagccctttcctttcaacatagatcctttctcaggatccttaaataattttaagtatttttttaatttcaattcattcatttagactatttaattaagacctttatttatttatttatttatttatttatttatatatttttgagatgggatcccgctctgtcacccaggctggagtgtagtggcatgatcacaactcaccacagcctcaaccacctaggttcaagcaatcttcctgcctcagtctcctgagtagctgggactacaggtgcacgccatcacacctggctgatttttttttttttttttaattttttgtagagatggagtctcactgtgttgcctaggctagtcttgcactcgtgggctgcagtgatcctcccaccttggcctcctgcgtgctgggattacagttatgagccacactcagccactaagaccttaattttttaggttccctttttgttgttgttcacaaatttaatatagctagagaaattactgggaccctaaattaaaagggaaactcattatgctgataaaagaatcttaatatgcagagcatttactataattttagggagctgtaaaagaataaagaaacattgttcaaaatctttttcgaaaatcagattttgagagatttgacctcaggaccaaagatgtttggatctcacaaacacatcttactagcttgaggaagcccaatggaaagaaaaaaaatttaatgttaacctacttcctatatgtcccttctactaagtaatttcaacctttttttctttaaattttaaaaaatgtcattattcagtaaaacccacatgcatatttgtgcacaaatgagattggagcatttgtgctggttagctttgttaaagttttgttctgttttcgcttgccttcctcctcctatatgccactcccacccctgtttactatgtttttaaaggaaccaatggttgaaataaataaagacttctaaactctattatgtgcaaattccctctaacactttgcttctcagaatatggtagagggaccaggagatgggcgtcacctaagcttgttaggaatgcctggtctcaggcctcacctagggatgcagatgactgattatttgcattttagtcatgtgatttgtatttttttctaaatcctcgacatgtgtagatgccttacggtcaagtgcttccagtttaaacagattctctgccctgcaacctccagcaccctcagggtccacgccatccacgcctgtagagtttgattcccgaaggaccttaactaggtgagaaccctgctttttatgtctactcaaggctggcccgcttgccagtatgtgtggcaagataagaacaagggttttgatagcaatccttatggatgcattccttttattcctaaagttgatttctttaatcttcacacactataatttctaagataggaacataattgggtggtgaatttgggatgggatgggagggaagggattcttaagaaagctaggcccacccaaacagccctggaggcatgtctaggggctccgcaagctaatcctccagatgttctagaagcacctagcattctcaaccatgggaattaaagaacatgacaatccacccatacatttctctgtcacactcttcatgttatatttgaggttgtccttcagtttttgctagtctccatatttcactatctttctgcttttgcttttctaggattgatacagtcaagtatcctgttggctggtttacataaaatgaatgggcaccctgtagtgcagtcacaaaaaataacattttttacataagcactttcagaattgaagtttctttaagctctaaaactttttttttttaattattattttttagagatggcatcttgctatgttgcccaggctggcattgaactcctggtctcaagcgatgctcccatcaggctttttattattattattgtaataagtttgattaggtagactttgtaaactgtgttcttattcccttgacttctattgaaacaaagtatagttagcacaaggcagcttttcatgatgattcaggttgtcattgagtatcacttgtggcgctttgccctgtcataaatgtcccctaatggttctgcttcctaagcacttgtgtatgttctttcacaatagttagaccattttcctgcccgagtctctccttttcccttttaatttgctgcttctggtctgccacgggccaacgaactgtttgctcagctggttagaattgtctaaaagaagacgaatcaggaaatatggagagtctctcttaaaaggaataaaatatatagcgttggctaatccaagacagcttcttcttgattctcaaatattttccatatgtttaaagattctaaataaaaaggtatcattgcataatttctgagatagtgataccatgttcttataatatttgtttccctttcatttatgtaactcatactttatcattgtcttctttattcctgaaagattttttaaaactaaaaaaagaaattgccaaaattaaggccgggcacagtggctcacgcctgtaatcccagcagtttgggaggccgaggtgggcagatcacctgagatcgggagttcgagaccagcctgaccaacatggagaaaccctgtctgtaatcccagctactcaggaggttgaggcaagagaatcacttgaacccgtaggcggaggttgcagtgagccgagattacgccattgcactccagcctgggcaacaagagtaaaactccatctcaaaaaagaaaagagaaagaaattaccaaaattatcactggctttttttgagacagagtctcactgtcacccaggctagagtgcagtggcgcaatcttggctcactgctacttcctcctcgcagtttcaggccagtctcatgcctcagcctcccaagtagctgggattacaggcacccgccaccaaacccggctaatttttgtatttttagtagaaacacagtttcaccatgttggccaggctggtcttgaactcctgacctcaagtaatctgccctgctcggcctcccaaagcgctgggattacaggtgtgagccaccatgcctggccaccactgacatgttaaagtgttaaatagtatcccttcagagaaaaaagttaaaacatcttaataaatattccctttaaagcactcttttacttgtttgttgaataaactttgaaatataattggtgcctcacacatctaatgttatctgtgaaaaattctgtatactttcagaaagtcttagtgttattttataatttgaatatgtgggggacatgggcttgtctttcctttgaaaagtgttgttttgtcttttaagtcgtggaagtatgggcagggagaagaatgacaagccccttccatctgcaacagctcggccaaatactttcatgaggggtggcagcagtaaagacctgctagacaatcagtctcaagaagagcagcggagagagatgctggagaccgtgaagcagctcacaggaggtgtggatgtggagaggaacagcactgaggctgagcgaaataaaacaagggagtcaggtgagagacttggcttaaacagatgcagatttgggttttaaatttggaaggaaaaataaaaaagagactgtgcctgagtagattttagaattaacacataatagcaacacataccagcatctgaagagttaaagggtacttcatagttttataacagttctcattccctaggtatgccttagctgaacagtttgtaaattttctcctttctctattaaatgttatggtgaggaggtcctcctgctgtattttaagcaatctgaatttcttacaagtccctgtaacatcccacacttgacgttgctgttagattgtgtatgctgtgtagagctcctcaaatgtgtgaaaattctcattgagccactgcaagacaaaccaaagagaaggtattaggttatctttagctgacttcatcttccgtggtaacctgttgtttttgtatgcatttagcatgtatatacttagaggacttgctcggataatgctctaaaaattgcttcatgtatttaacctgtgtttcagtttccttatctgttaaatggggataagttgtacctaccttttcaggatattatgaaaattaaataagaagttaatacacgtaaacacttagaacattacgtgataaatacaaggttttcaaaaagtattaaatgttgtgatgacgaatatagcaatggaaaacagtttaaattgaagattattttcagcctcttttaaatattagtcatgaagtaatagcagttttagttttttagtatttatatagctttctaatttgtttcactatataaattgtatctcttaactgtagtccctaaatggatctcagagacaaattgaagtgtcttctcccaattggtgtaactttagataatacagctttagggacatatggcttttttaaaatctgtgctagatacttttgaaatataacaggataggacataaaatatcttgggtgtaatgaataatgtagcacagctgccctatgtgtttttattgtctggttcatttgtacacttaccagatgcacagtgaatgtgaggcccttgatccctgttctcggccttcagtctgctgagtcagaaagaccttttttagtaattccacgaaagacacaaactgagaaaggtgctatgaaggaaggaatttagttctaagagaatacttagaactatctggtaccaaggagctatgtagaataggggcaaggggaggtttccttcatccgaaggaccagtaggaatgaaacaggttcgtaggcaaggatgggtgtgaaacagagggaaagagcactccagacaggattactgtgagcagagctgtagtaggaatagccacggtttgttcaagcagctgcccaagatcagtgtggctcaagcttagtggcgagcagggccctgacctgtgcaggattgtgaagacctcatgtactcttcatctttgaagcaatggggagcaatcataatacagaaaggaacaaaaaagctttaattaggaaagtttatcatgttcctaaatcttgttcattgttattgtagattataaagttacttagtgcgaatctattctaaaacaaaaggtttctgtattctgtttttatctattaaatgtcttgtagctattaaaataatgtaatagcacataatattgtcaaccataatctcactattttaatagtaatttttattatttttactttttttggggggcctcactaatagcaaaaccagaaatttcagcaatgtcagctcatgacaaggctgcattatcagaagaggaactggagaggaagtcgaaatctatcattgatgaatttctacacattaatgattttaaggtaaatgagattaaaaaaaaaacacacacacagtaagtcctttgatagtatagaataacttggttctggtctaaatcaggtgtcattgtgaactgataagacttaggttgagtaatacaagtcctacacaattcagtttgcttaacgctgatgcatttctgccaagtactctcttttaatttgatactataatttacaacatagagtggtgggcagagagtatgagtaccaatccatccccactaagggaaaaccaaattgatttctatattaaggaacaaaaacaacacattatcattatgaagcatttctggcaccctgtatatagctgtcatggtctttttttttttttttttttttttttttttgagacagagtcttgctgtgttgcccaggctggagtgcagtggcacgatctcggctcactgcaacctccgcctcccaagttcaagcaattctcctacctcatcctcctaagtagctgggactacaggtgcccgtcaccatgctgagctaatttttgtatttttagtagaggcggggtttcaccattttggccaggctggtcttgaactcctgacctcaaatgatcacccacctcggactcccaaagtgctgagattacaggcgtgagccaccacacctggcctgtcatggtctttataatcattctgttatcattctcatattaatcttgaaatatggccagcattactttttctttatttcataaaactgaggcataaagaaacaagcaatgtgccaggtcagacagcctaagccagagatttcaagacaaggccttgaatttgccctttaacccttaccttctctttaatcttcattttgagatagtagtgaataagacatttctacctgaccttgtgaaccctatagtctagtggcagagacaaaccataaacaaataactccactagcagttacttaactgtagttatgataaatgctagtagacctataggtcttaggagaaatccattaatgggatctgattaagtgatgtgaggtcaggaaaggctaatctgttaaaacagtcttatctgttaaagtatttgtcagatatattaactacttttgctgctttggcactatattattaaaaattctttcaagattatttgttttcttggccgggtgcagtgactcatgcctgtaatcccagcaccttgggagctgaggcaggaggatcacttaagctcaagagtttgagaccagcctgggcaacatgataaagccccatctctacaaaaaatacaaaaattagccaggtgtggtggcacgcatctgtagtcccagctactcaggaggctgagatgggaggatcacttgaagcccgggaggcagaggttgcagtgagccgagatcatccactgcattccatcctgggtgacagagtgagactgtctcaaacaaacaaaaaaaaagaaaatattacttgttttcttaacagtgtaatcatcatctgctttccacatataaaaatcaccttggttatctatagttcaatcttctaaagccttcaagcctctgaaattcttcaaaattcagaagaagtagaaggaagtttttgatgatgagtgaggtggaggtgagtgctttgcagaaactgttggaaatgtaccaaagtaaatgaacattaacgggaaatagccaaagaataaacctgatgtactgtgattcatcagttagcctcctggaaaattaggggtattcttataaattggcagcatagcctttttcttgcatggaagtagggaaatgtgaacgaattgcaaaaaaattagaatggccaagaaagatgaaacgccaagacagtaaggaagaaaacagtggagattggcttcagatgtaatttgaaggatgtacaaagtcaatgaataaccctttaaaaggggaaaaatatgatcctgtgatgaactggaggtatagggagtaaaagaccttagtaacacctaaagagtacaataggaggactctttggagaatcatgagccctgggccaggcttgcaatacagaaggggcagaatcgttgtatctttagaatttcattgtgcagtgtacaaagcaactgtgcctgcaatatggttaaaacaggtattaacattgggcatttactgaggacttactctgcgttgggtgctgttgtacatattcggcatgtattagtttgtattgtcctcgtaacattctcctgaagttgatgttattatcatacccatttttcagataaggaaactgaggtgcaaagatgtaaatcaacttgttcaaaatcttaactgctaataagtgccagattgaggattcaaagctaagtttctagcttcagaggagaaaatgctttatctcattacctttggggtattagtgtgtcaggctaaagacttaaagagctgatcttaaaaatattttttccaaatatcttcctattaggtgctattgtttttaacagtgattcaaattaatatttattgagggtttattttgtgcctggcactgtgccaagttcttatacctatattttatatacattcctcacggtaactctaaaaagttaagcccaagagattaagttaaactcctaaactctaaagtagtaagtggcagagccagggttcaaatgcacctctgtctgaccccaccgtgcatgttttagcctctatgctatttatttattgaatacctaagtgtgctagccacattttaggggttatgactgggtataccatatttgtagtgaacaacaaaatctgcttccatggagcttacattccagtggggagatacagacaagtctggccctaaagataggtagtaaattaataaataaacagtagctaccaaaaaaatgttttcagtgccaaaaactaaaattatgtgatttgatggagtcagggaagacaggaagtatcatttcaactaaaagctcaaagacaaaaagaagcaaaccataagaaaaccagatggaagggcgaggttatgaactgctatgacactgtgagtataatgatatagctggaagtattacccttgaaaaccagtgcaagacaagaatgtcctctctcaccactcctattcaacatagtactggccagggtaatcaggctagagaaagaaataaagcatattcagataggaagagaggaagtcaaactctccctgtttgcagatgacatgaacctgtatctagaaaaccccatcatctcagcccaaaagcttattaagctgataagcaacttcagcaaagactcaggatacaaaatcaaagtgcaaaaatcactagcatcagtcaagctgaaagccaaatctccagtgaactcccattcacaattgccacaaaaagaataaaatacctaggaatacagctaacaagggaagtgaaggatcactacaaggagaactacaaaccactattcaaagaaatcagagatgacacaaacaactggaaaaacatcccatgcttgtggataggaagaatcactgtcatgaaaatggctatgcgacccaaagcaatttatagattcagtgctattcccattaaactcccactgacattctacaaagaactagaaaaaagtatttaaaaattcatatggaaccaaaaaaaggagcccaaatagccaaggcagtcgtaagcaaaaagaacaaaactggaggcatcacactgccctacttcaaactatatatatgtattttttttattttttatttatttattatttattttttttcttgagatggagtcttgcactgttgcccaggctggagtgcagtggcgcgatctcggctcactgcaagctccacctcctgggttcacaccattctcctgcctcagcctcccaagtagctcagactacaggcgcccgccaccatgcccggctaattttttgtacttttagtagaaacggggtttcacggtgttagccaggatggtcttgatctcctgaccttgtgatccgccctccttggcctcccaaagtgctgggattacaggcgtgagccaccgcgcccagcctacttcaaactatattacagggctacagtaaccaaaacaacgtggtgtggtacaagaacagacacatagaccagtggaacggaatagagaacccagaaataagactacacacctacaattatcttatcttcaacaaacctgacaaaaacaagcaatggggaaaggattccctttttaataaatggtattgggatacctggctagtcataagcggaaaattgaaactggagcctttctttataccatatacaaaaatcaactaaagatggattaaaatgtaaaactcaaaactatgaagaagaaaacttacacaataccattcaggacataggcacaggcaaagatttcatgatgaagatgccaaaaacagtgcaacgaaagcaaaaattgacaaatgggatctaattaaactatagagcttctgcacagcaaaataaactatcaatcaacagaataaacagacaacttacagaataggaggaaatgtttgcaatatacacatccgacaaaggttttttttgttgttgtcttttttttgtttgttttttgagatggagtgttgctcttgtcgcccaggctggagtgcagtggcgcaatcttggctcactgcaacctctgcctcccgggttcaagtgattctcctgcctcagcctcccgagtagctgggattacaggcgcccgccactacacccagctaattttttgtatttttagtagagacggggtttcgccacgttggccaggttgatctcaaactcctaacctcaggtgatccgcatcccaaatactgggattacaggcgtaagccaccatgcccggcccccgacaaaggtcttatgtgcagcatctgtaaggagcttaaacaaatttacaagaaaaaaaaaacacacactaaaaagtagacaaaggacatgaacagacagtactcaaaggaagacatacatgtggccaacaatcacaagataaaaaagctcaatatcactgattattagagaaatacaaatcaaaaccacaatgagataccatctaataccagtcagaatgactattattaaaaagtcaaaaaataataggtgttggcgaggttgtggagaaaaaggaacacttttacactgttggagggtaaattagttcaaccattgtggaagtgtggcgattcctgagagacctagagacagaaataccatttcacccagcaatcccattactgtgtatatacccaaaggaatataaattgttctcttataaagacacatgcacacgtatgttcattgtagcactattcacaatagcaaaaacatgcaatcaacctaaatgcccatcaacgatagagtggataaagaaaatgcggtacatagacaccatgaaatattatacagccatacaaaggaccaagatcctttcctttgcagggacatggatagagctggaggccattatccttagcaaactaatgcaggaacagaaaagcaaatacttcatgttctcacttataagtggaaactaaatgatgagaacacatggacacgtagaggagaaaaatgcacactggggcctactggaggacagaaggtggaaggagagagacaggatcaggaaaaataactaatggatactaggcttagtatctgggtgatgaaataatccgtacagcaaacccccatgacacacatttacctatgtagcaaagctgcacatcctgcacatgtacccctgatcttaaaagtttaaaaaatatatatcatgatatagctaattgaccctttatgcaaacacagtgaatgaattcccattagaagacatttaatcacttccatttaaatactgaggaatgatttttatttatttatttatttattttttggagacagagtctcaccgtgtcgcccaggctggagtgcagtggggtgattacagctcactgcaacctccgcctcccgggttcaagcgattttcctgtctcagcctcccgagtggctgagattacaggcgtgtgccactacacacggctaatttttgtatttttggtagacacggggttttaccttcttggccaggctggtctcatactgctgaacctcaaatgatctgcccgccttggcctcccaacgtgctgggattacaggtgtgagccaccgcttccagcctgaggattgaatatttgcattcatttacaagtcctcttgaaaaggcataacaatgatgttgattggcttaaaataaggttaaaaaacccacaaggggccaggtatggtggctcacacctgtaatcccagcacttttggaggctaaggctagaggatcacttgagcccaggaatttgagaccagcctgggcaagatatccatctttacaaaaaaatttttttaaattagccgggcatggtggcatgcctgtggtcccagctacttgggaggctgaggcgggaggattgcctgagcctgggaatttgaagcagcagtgatctataatcatgccactacactctagcctgggtaactaagtgagaccttctctctttaaaaaaaaaaaaaaactaaaagacccacaaggatgaagagaccagggaatagacagaagcaacgttctggaagttggaaataagaaggatgagtggtaatttatttaacaaactaagactgtctgtgaggtacagatgtggccagaaacaaaagggaattagttggttaaaagcatatataagaaacattttacagccgggcgcggtggctcacgcctataatcccagcattttgggaggctgaggcaggcgattacctgaggtcaggagtttgaaacctgcctggccagcatgaagaaaccttgtctctactaaaaatacaaaattagccaggcgtagtggctcatgcctataatcccagctacttgggagactgaggcaggagaatctcttgaacctgggaggcaaaggtaacagtgagccaagattacgtcattgcactccagcctgggcaacaagagtgaaactctgtctcaaaagaaaaaagaaaccattttacatgataattgtcttgaatgtttcaaaaatggcaatgtcatgaaaagacaaaaaagagaaaggacgattttagattaaaggaatctgaacaacataacatgtaaagtcgggttctcaactggactcagcaacaacaaaaagctatattagacattcagagacagttgtggaaatttgaatatgtactatatatcaaatatttttattgacattatagtaaatctcttggacattcagaaagaaaacaacaattgatgaatctaaaagtgaagatatgtagttgtatattgtatgactctttaatttttctgtaggcttgaaattttgttagataaaaagttaatgtgagggaggtattaaataaaggagcagggaggaaaaagcggcagtggtgagacacctagatgagccttctcccttctgcatcagttcatcacccttcctacctacatcctcccccttcctacctacatcctcccccttcctacctacatcctcccccttggaagagctactttgctgcaaaggttgaaccaaaagattgtgaattcagggcaccagactaatttccagtagctgagaacagagagatacactgctttattggtgtatcagcaactctggctgaccgactttcacccttcagaccaaagatattgacttggctggatactctatagtaaacaccagttaacaagcacaaattaagaagcataccacaagaacttactaaaagaattttaatgcttaacctaaccatatcacttaaatttaactttcatatgaaggaagacctttttcattgaagattgtgcaaatattaacctacacagacacagtaacctctgttgacacattaaggcttttgaatcatgacattaaatttctatttcataatataccattttcaattttttaaatcagtgatcataaaataagtaaatattatgtagaaaaatacatttgactcaccctttgagtgatgtttaataaaattgttaaactaaacatgttagctttgtaaagatgcatcattataaaattttttttatttataaaaacagttctctggtaaaaactggaaaacctactagataaatttgaaaagggctgtaatgctctttttttgtatgacttttaatattgcccatatcagcctgtaatttactgagctataaattatgttaaacaaatataaacttatatttgaaaactgtcctgttcatggaagtttctactgattctgttgtaagtaaaagattttaaagttatcttaacattctggtaacactattcagattttggagtaaacctttctttgctgttggaacaggaagccatgcagtgtgtggaagagctgaatgcccagggcctactacatgtttttgtgagagtgggagtggagtccaccctggaaaggagccagatcaccagggatcacatgggccaattactctatcagctggtacagtcagaaaaactcagcaaacaggactttttcaaagggtcagtatcctcttcaagagtggtattcagttactaggctcttgggtaccagttaattttcaaagtacttacctctttaagtatttagttttttccatagatgaaaattgtatccactgtaatatgttgatatgatgcaattaatatattgatatgttggttgatgtgatggcattttatagattgtgctagggcataaaggttatcttttggttttctgaatattattgttagatctctatcatgatgtaagtaaggtaacagagaccccttagcctcagggaaactctgaggcctttagcagcccatttacatgtgatccccaaatgttctttgaggaaaaaagcttttctttgtgagaacaattctgaaaaattgtcttaaatttaaaaaccatattctttcaataaaccatggttattgtggctaggaagcacttgtgtgcccactctagcctcatggagaaggttatgtaacttggtgttcttaatgatttagtctatttcaggttggtttcattatgattcttgtcaatggatggtttgataaggtctgcctatctgcctgtcactggtggtgaatcctcatttgatcaggttctggtatatttgtgatataccatcatcacaagtacatggatcaggttccttgtggttcagccacaaaatcttacccaggcatagggtgtataaccaatgtttaaagtgaaatttgcattggtaaaaaattttgttttaggagccatgttgtatcaaatataaacacagagtcacacccagcactgacagatgcccactctctaagggaatagcaactaggatctcctaaggtctggacattggattaacatctgccatctcatcctcacctggacatatgcttattgaatcaaatggcagtaagaattctgtactacttgtaattttcctcttttttttttttttttgccaagctcatgttctcataaattaaatgcacatatgattaaatgccactgtatatttttccgtagtcatttcacatatggcaatccttttagaataaggtaaccattaaatgtcattgttggccaggtgcagtggctcacacctgtaatcccagcactttgggaggctgaggcgggtggatcacttgagatcaggagtctgaaaccagccacggccaacatgccaacatctactaaaaatacaaaaattagcccaacgtggtggcgtgagcctgcaatcccagctacttgcgaggctgaggcataagaatcgcttgaacccgggaggcagaggttgcagtgagccaaggttgcaccactgcactccgcctgtctcagtctctaaaaaacaaaaaagtcattgttgaatttattcgtttgactttgcaagcaatgacagcgttgtcttctaggtcctagaaaatttatacttgcccctaggaccattaaaaagttttcttgccaggcgtggtgactcacgcctgtaatcccagtattttgggaggccgaggtgggcagatcacgaggtcaggagttcgagaccagcctgaacaacgtggtgaaaccccgtctctactaaaaatatgaaaattaggctgggcaccgtagctcacacctgtaatcccagcactttgggaggccgaggcgggtggatcacaaggtcaggagatcgagaccatcctggctaacatggtgaaaccccgcctctactaaaaatacaaaaaattagccgggcgtggtggcacgcacctgtaatcccagctacccggagaccaaggcaagagaatctcttgaaccagggaggtggaggttgcagtgagctgaaattgcgccactgcactccattctgggcgacagagcaagactccctctcaaaaaagaagttttctttcaggctgggcatggtggctcacacctgtaatgctagcactttggaaggctgaggcaggaagattgcttgagcccaggagtttaagaccagcctgggcagcatggtgaaactccatctatactaaaaatataaaaattagctaggcatggtggtgtgccgctatagtcccagctacttgggaggttgaggcagaaggattgcacctgggaggtccagactgcagtaagccatgatcacaccactgcactccagcctaggtgacagaatgagaccacgtctggggaaaaaaaaaagttttctttcagcaataagctagattgctctgaattaaggccatttgaaccagttagtaagacactttggcaaaagttgctgtggttattggtttttaaggccaggatggtttcccagttttaaaagagaagcctccaattcagtccagtaactagccagtgcaaatggtaagagcaaataaaggtatgtacaccctcacaatcagattgaatatggtcctcccagcagacttgaaactataatttcctagaaataatactgttggagtgacgaggatatccatttataaatagttacttattacccagatattatgctacattcctcagaaaattctggaaatgataatggtaaattatcatttaccattttctgtctcttcaaactatactcggaagttgattcatatctataaagatgcccagaagcatagtctacctttattggctataattgaacttgtgagatactagcttagtctctcggatatctcagacatttgcatttctccctttgtgggattctctgaagaaaaaatatcataaccagacgtggctacagttttgttgttggtgttagaattgctgttgccggcaataattaccacactactaccttttatttagacataaaatgaggttaacacttctgtgtctcagcaattacttcatgtttcaccatacctgcttccgtctgcagctagaggcagtgcagtgactccaggcctaaccttcgatgcttagacctaaccagtcttggaccttagaccaagacatgtaaaagttgtactattttattctaaatggagaggcctgacaatttagtgccacctttttctaagagggaaatgtagggattgcttcatgtcagtgtccaccaagagctttcttgcaagcagatcagaatttcacaatcccttctaaagcctgagttataaatggttcatactgtctagagaggccatttcattggagccatgaagataccctgtcttttgcttctttattcttaacctacaaagatagtattgtccttccatagtattgtggaagagcctctgagatcagctgttttgggtgctgctactgcttagatgtcaacttctgaacagttggggaagcagtttctgcctagctcgccaagccaatgataactctgggaaggttagaaagcagaaagccagccaggcgcggtggctcacgcctgtaatcccagcactttgggaggccgaggcaggtggatcacgaggtcaggagatcgagaccatcctggctaacatggtgaaaccccgtctctgctaaaaatacaaaaattagctgggcatggtggcgcatgcctgtaatcccagctgctcgggaggctgagacaggagaattgcttgaaccagggagtcagaggttgcagtgagctgagattgtgccatggcactccagcctggcaacagagactccttctcaaaaaaaaaaagaaaagcagaaagcctccaggtatactggtccctggtgaggtagctactaatctgccatttctccctatagctctttagagtatgcactgctgcaaagtagtaaaatagacaaaagtttcaaataggctttatgaatatagcttttaggtcctttggaattttccttacaagatgttatatcaactgtgagcataatagttgctgtatgtgaaacatatctccgcaaagaaaacatcaagccatcgtcctgatattttcaggacttgaatctaaatactttatgaccctagttaggttggtaggtagataggtagaagcattattgtataggtacatgcacttcaaacagtgtgttgatagtctttttatatcatgatttcagaaaacttctttttaaaaactgtctagtaaatatagttgagtgcagtttgctgttagtcacagaactggaatgactttgaaagtataataaacaaatgaagaccaaggttgtaaaaattagagtggacaatagacacaaaatatgtaccctagaggaagattgatacattaatatttcactttgggagatgttttgttagagaggaaattcttatctcttccttgaatacttttctggaacctttattactgcttacggcaattctacattggtaaaagaccctatgtaggctggacacagtgattcattcctgtaatctcagctaccagggaggctaagatgggaggatggcttaaggccaggagttcaagaccagcctgggcaacatagcaagaccccatctgtaaaaaaaattaacaaaaaaattggctgtgcatggtggcacgtgccaataattacagctacttgggaggctgaggcaggaagattgcttgagcccgggagttcaagctgtagtgaactgcgagagcatcactgcaccccagcctgggcaacagagtgagatcctatctttaaaaataaaaaacactttgggaggccaaagtgggcaaattgcttgagcctaggagtttgagactagcctgggcaacatggtgaaaccctatctctaccaaaaaatacaaaaactctctgggcatggtggtgggtgcctatagctgcagctactcaggaagctgaggtaggaggattgccatactgatcttgtaaaatgacttgggaagtattttctccacttcaattttttggaagaatttgagaagaatttgttcttcttcaagtgtttggtagaattcagcagtgaagccatctagtcctgggcttttttttttttctctctgagatagggtcttgctctgtcacccaggttggagtgcagtggcttcatcgtggctcactgcaacctcaacctcctgggctcaagtgatcctcccatctcaacctctcaagtagctgggacagtaggtgcatgccactgtgctcagctgattttttattttttgtagagatggtgtctcactatgttgcccaggctggtcttgcactcctagacaaatgatccttccaccttggcctctcaaagtgctgggattacaggtttaaggcagtgcacctggccatgattcagtcttgatttgttgtatatatctatgagtttatctgtttttttctagattatccatttattgttcatagtagtttcttatgatcctttgtatttctgtggtatcagttgtaatatctcctctttcatttcttattttgagtcttctgtcttttctcctagtctagataagggtttcttgattttcttcatttttccaaaaatacaactccgagtatcattgatttttttctttcattttttaagtgtctatttcatttatttctgtttagatgtttgttatttccttccctgtgctaatttggggcttagtttgttcttctttttctagttccttgatgtgtaatgaatggtatattgtttgagatcttttttcttttttgatatagatgctcattgctatacatttccctcttaggagcacttttgctgcattctataagtgtcggtatgttgtgtttccattttcatttgtctcaagatattttttaaaaattcctttctaatttcttctgtgacctattggttgtttaggcagatgttgtttaatattcacatatttggatattttccaaggtttctcctgttaactgagttcaagttttattgcattgtgatccaaaaagatacttgatatgatttcagtcctcttaaatttgttaagtcttgttttgtggtctaacatatgatctattggggagaatgttttatttgcactttagaagaatatgtattctgctgctgtttaatggaatgttctgtatatttttgtttggtttaaagtataattcaagcccaatgtttccttactgattttctgtctagatgagttgttcattgtctaaagaagggtattgaggtcccctgctcttgctgtattgtagtctgtctttcccttcagataatcaattgccctatgtttttaggtactccaatttgaggtgcatatgtatttataactgttatatcctcttagtaaatggattcctttatcattacataatgacctttgtctctttttatagtttttgacttaatgtcctttttgtctcatataagtatagctacccctgccctcttttgatttctattttcatgaaatatctttttccttctcttccttttcagtctatgaatgtccttagtagtaaagtgaatctcttataagcagcatatggttggatctcatttttcatttatttattttttagattttgtgagagtcacactctctcacccaggctggagtgcagtggcgcaatcaaggctcactgcaacctctaccttctggactcaagcaatcctcctgggtagttgggaccacagccatgcatcatgatgcctggctaattttttttatttttttatagagacagattctccctacaatgcccaggctggtctccaacaactaggctcaattgatcctcctgccttgacctcttcaagtgttgggattacaggcatgagccattgcgcctggccggatcttattttttaatctatttagccactcagtcttttgattggaaaatttaatccatttacatgtgacataattattgatagataaggacttgctactgccattttgtaatttgttttctggttatttttgacaataccactttcaattgtggtagcattattttgcttttttgaaagatttcttatcagaactttactgcgttaaaatttttaaatatttttcttccaacactatgttgaataggagtggtgagagagggcatccctgtcttgtgcccgttttcaaagggaatgcttccagtttttgcccattcagtatgatattggctgtgggtttgtcatagatagctcttattatgttgaaatacgtcccatcaatacctaatttattgagagtttttagcatgaagcgttgttgaattttgtcaaaggctttttctgcatctattgatataatcatgtggtttttgtctttggctctgtttatatgctggattacatttattgatttcctattcaacatagtgttggaagttctggccagggcaattaggcaggagaaggaaataaagggtattcagttaggaaaagggaagttaaattgtccctgtttgcagacgacatgattgtatatctagaaaacccctttgtctcagcccaaaatctccttaagctgataagcaacttcagcaaagtctcaggatacaaaatcaatgtacaaaaatcacaagcattcttatacaccaacaacagacagagagccaaatcatgagtgaactcccattcacaattgcttcaaaaagaataaaatacctaggaatccaacttacaagggacttgaaggacctcttcaaggagaactacaaaccactgctcaaggaaataaaagaggatacaaacaaatggaagaacattccatgctcatgggtaggaagaatcaatatcgtgaaaatggccatactgcccaaggtaatttacagattcagtgccatccccatcaagctaccaatgactttcttcacagaattggaaaaaactactttaaagttcatatggaaccaaaaaagagcccgcatcgccaagtcaatcctaagccaaaagaacaaagctggaggcatcacactacctgacttcaaactatactacaaggctacagtaaccaaaacagcatggtactggtaccaaaacagagatatagatcaatggaacagaacagagccctcagaaataacgccgcatatctacaactatctgatctttgacaaacctgagaaaaacaagcaatggggaaaggattccctatttaataaatggtgctgggaaaactggctagccatatgtagaaagctgaaactggatcccttccttacaccttatacaaaaatcaattcaagatggattaaagacttaaacgttagacctaaaaccataaaaaccctagaagaaaacctaggcattaccattcaggacataggcacgggcaaggacttcatgtctaaaacatcaaaagcaatggcaacaaaagacaaaattgacaaatgggatctaattaaactaaagagcttctgcacagcaaaagaaactaccatcagagtgaacaggcaacctacaaaatgggagaaaattttcgcaacctactcatctgacaaaggggctaatatccagaatctacaatgaactcaaacaaatttacaagaaaaaaacaaacaaccccatcaaaaagtgggtgaaggacatgaacagacacttctcaaaagaagacatttatgcagccaaaaaacacatgaaaaaatgctcatcatcactggccatcagagaaatgcaaatcaaaaccacaatgagataccatctcacaccagttagaatggcaatcattaaaaagtcaggaaacaacaggtgctggagaggatgtggagaaataagaacacttttacactgttggtgggactgtaaactagttcaaccattgtggaagtcagtgtggcgattcctcagggatctagaactggaaataccatttgacccagccatcccattactgggtatatacctaaaggactatgaatcatgctgctgtaaagacacatgcacacgtgtgtttattgcggcattattcacaatagcaaagacttggaaccaacccaaatgtccaacaatgatagactggattaagaaaatgtggcacatatacaccatggaatactatgcagccataaaaaatgatgagttcatgtcctttgtagggacatggatgaaattggaaatcatcattctcagtaaactatcgcaagaacaaaaaaccaaacaccgcatattctcactcataggtgggaattgaacaatgagatcacatggacacaggaaggagaatatcacactctggggactgttgtggggtcgggggaggggggagggatagcatcgggagatatacctaatgctagatgacgagttagtgggtgcagcacaccagcatggctcatgtatacatatgtaactaacctgcacaatgtgcacatgtaccctaaaacttaaagtataaaaaaaaaaaagaaaaagtaagatgattggaaggaaaacaataaaatgatccttattttctggtaacataaaaaaaaaaaaagaaaaatgcaaaggcaaagaatcgatcaggttggcagaagctgttccctggcttatgggcaggagggagctggtgaggctttggaaattctattgctaacactaacacgggagatctttctggcctttctggttttggcaatggctctttttctcctgccttctaaggtactacaggaaaaaatatttcctctacctccatcccacattgcccaggaacattttaaagattgaaggctttctcaaaaaaaaaaaaaaaaaaattaatatttttcttttaatcatgtatccctttcttcaattaaaattttacacaaaaacccagtaaataaaatgaagtggagcttttgtagttgaaatgggcggagggatatctgcagtctcatctatgtagaccttaccaaagttcagtccagtggctgtggttttttccttccacccaaagaaaagcctgacagtccaatgactgtgatggtcactacatgccaagaggcaagggtatgatgtagctctgtttcattttttcagcttttagaaaataacgtgtggtgcaaagcattaatataggctatgtagtagtgcaaagacataaagacagttattacctaggtgcttcagcacactcaagatttttcttttagaatcatgcaacaggatttaagaactgtaaacctgaaaaaaaaataagcttcttacaggcttgttctatggaaatcctatgttcagccaaaaaagttttttgttagcagtatagatttgaccactgattgtgttctgtggactgtcccatgatgaactgactgatcaaggcataaaaaaccaaagcaagaatatgggtatattttatttgtaatgagataaaatatatgagataaaaatagcagcaggtacactgctgaaagaccagcatggctacagttgtctcttgggcccattaaacagcttaatttatgctgctagcccacagagcatgagttggcaggatcaggtggttaacctagaaatcctggagtccagctagattatatttcatcagtggtacattaactgaacccaaagtatgcacataatgagagaacctgcaattatttgacatctatttgccatagcacagacaccgtcctcggcatcaaataattgcaagctgtgaggtcagaaagttggaattaaggattcatgaagcccagagttagataatatggctgagctgcaaactgttttgaagtggcagcttcagaatggtgaccctgcctatggtggtagctctttttaagtgaaaagttttagtgagatgtaggcctctgaaaaaagggtggcatactttggctagaacctggaactgcagtggaaaagcacacgttttacaattgtagagatctgaaagggcatgcatacaattaccacctgctcttagctcttcaattcattcctccctttccttatgacttgcaattatgtgtatgtctcctgtagttaaattcatttgcttttgtactttattatatattgtatgtggaaataattaacaaagtcttgagttgtttgtttatacttccaaatgaacagctatgatttttagcctacataagagtgctggtattttatatttgattttcctaagttttatatttaattcccatttgcttgacattgagaaatatttataattcatagcacaaaagcctgaaaccattagcttttctgtagagatagaacagttcgtaacatgtaataatgatgatagtgttagtaatgttgccagactcttttatatccatccagttttttccccattgtaagattcctcaaggacacagatttttgtgttttacagtaagtgtttagtcagtgcttttgactgactcagagaatatgatattcaactgtggtgaattctttatagtgcaggattaaatggataatttttcccctagaacttcacaggactgtccttcttttcatcatttaaggctttcaaatgtcacctttatatggaggtattttctgacctccttcttgtacatagttcatgttcttcagagtattagccctatttgcaagtatgcttttgtctgttctagtctttttcccccacgctaacataatctctttgagaatggtaatgtatttaccagtcactttgtggctagactgtacctaacatagcaggtgattaatatgtatttgttgactgattttttatctctttatttaattttaacttttgaattacatttgcatgtgatttttaccccctgttccttttcagtttttcagaaactttggaattggcagatgacatggccattgatattccccatatttggttgtaccttgctgaactggtgacccccatgttaaaagaaggtggaatctccatgagagaacttaccatgtaagttatacttgtttctcttgatatatatcaggtagaactgactaataactcacttgctagctctctatcatagtactgtcccattatcgcctttggagactcatgaatgcaggctgtgactctttaagacttctgatttcagtgtaaaaatgttaccttatgctaggtctacacctgagatattctggggatatgatagccctgtggtctgttgagggtagtggcgatgatagattggctccagaatcgtgtaactggaagatgactgcttctagaagcttaatgttcatctggcttttgtgtctatcattgcagtagtgctgtaagtagttatattttcccattgtaacttgtcagactgcattaccccatagtacatgctcatgattataataaaaggatgattataataaaacaaactgagatctcaagtattcctacgtttggatgtgagtggggaatggatgctacgttatatagaccggtggttcccaaactctgttcttcgaaacactagtgtttccacaaaagttgtttatatagtcaaactttgcacatggtcatgtcccttttctttgagattaacaaaacatacttagcatattaaagtttatgacagtcctatagtaaagcaataaataaaaactagttagctttgtttaattcagcattgcctcacttagagtatagatatcctatggaacacagtttggtaaatgctgatttagactgttacaaaattggcccctttgctgtttcatccataatttcatctataaagaaaagcttcctttcttaaaaatactttatatatggccagacgcaatagcttacacctgtaatcccagcactttgggaggccgaggcaggcggatcacaaggtcaggaaatcaaaaccatcctggccaacatggtgaaaccctgtctctactaaaatgcaaaaattatctgggcatggtgttacgtgcctgtaatcccagctacttgggaagctgaggcaggagaatcgcttgaaccagggaattggagattgcagtgagccaagattgcgccactgcactccagcctggcgacagagtgagactctgtctcaaaaaaaaaaaaaaaaaaaaaactttataaaagcatcacaactccctgttacctaaggtgcttctcattttagcttgaagcagaacttacataaacaaacagattaccacatctgatctttgtgttgcttctgtcactgaagtggttaaagaaaaaggtaaaaaccaagaactcacatgtaccttttcaggaacttctcctgaaaatgacttagagcatgtcctggagctttggcttgcccagtattatgtaggttgcacagtatctggtttttggtcacacattgtttgcctcttgttctagaagaaaggatttctttagagatacttaatcactgctcctatcttttacagagaatttagcaaacctttacttcctgttggaagagctggggtcttgctatctgaaatattgcacctactatgcaaacaaatggtgagtgttacactgagtgtcagactcaacagtattattaggaagggcagtgatcttgatcttgggttatctgtgaatagcttaggtctcagggtgcaagtaattaagaatgaggtctctgcttcaacccagtttctttctgaggtgcatttgtccttctgtttgctaatatcttggggcagaattatcaaatctcgactagatttggtataattctaaagaatctcaagtcatgttttatttgtagttgattttttcttcctttgaaacaaaatggatatatcatttatatgttttaatagatttcaacgaaaagctccatagagctggaggctgtcagtctatggcaggctgtcagtctataaagtgggaacagataaatctaaaccaataatttcaaaagagtgaaagtgctttgttagaagtctaagaggtttggggaagtgttgtggcatcacaaagggaataaaatgtctaggatgagagggatgagagatgtcaaaacaaaacagaactcagaaatgaagattctggagtgatttctgacttacttacgcctgactcaaagatattggatgatagattttaatgtttaaagtcagtgtttcattcctccctctgatacagaagtccttctgtatcccatttgtgtggtagttattcataaacagatgtactaaatatcctggtctctagttctgttgactatttgttaatactactctttgcttaatggcactaaaatttttactgaaccctagtttttatgtccaaaatttcctcctctccgacctacttgactttagtccttatttaaaactcacattctggccgggcgcagtgattcacacctgtaatcccagcactttgggaggccaaggtgggcagatcacgaggttaagagatcgagaccatcctggccaacatggtgaaaccctgtctctactaaaaatacaaaaattagccaggcatggtggcacgcacctgtagtcccagctacttaggaggctgaggcaggagaatagcttgaacccgggaggcagaggttgcagttagccgagatcatgccactgcgctccagcctggcaacagagcaagactctgtctcaaaaaaaaaaaaaaaaaaaaaaaaaaagaaagactcacattctggctggcacagtggctcacgcctgtaatcccagcactttgggaggccgaggcgggtggatcacttgaggtcaggagttggagaccagtctggccaacatggcaaaatcccatctctactaaaaatacaaaaattagccaggcatggtgacaggcacctgtaatcccagctacttgggaggctgaggcaggagaatcgcttgaatctgggaggtggaggttggagtgagccaagattgtgccactgcatttcaacctgagctacagagagagactctgtctcaaaaattaataataataactaaaaactcacattcttattaactttgatgtgtagaaacagcacaaccctacttccaaataaaactaaattctcatatagtataagctttggagccagatggccgagttcaaattctggttcaactatattttcagctatgccttggacaagttactctatgaagtaattaatacatacctctcagatgacagcaacagcctcaaacctggcattttccgttgtcactgtaactttcttcaggtagaggacttgtacctcttcacttttttctacctgacaacagctcttctttattctctctcttgggctcaaccttgtgcttcttgcccttgaaacacttctcattcctggttcaggagcaacaactgctttaagcctccttgtatcaggcagcatggctgtgatctattatgaagagggattctagtgaggcttcttgaatggctttaatagcagatacatacagagctatctaggaaaagacacagtgtggaatttataaactctgtgtattggactttttttgatgtttataaatcccaaataaccagctgtagctccccagattagtcacctcataaatcaattatttaatcttaagcagctgtacttcaattattcaccattgtatttatgtgcattcagacatcttagtttgaaagtcacaagtcttaagagattaactttttatcagtgaggaaaagtttgttttcgagactggtcttgctgtgtgtgttgcctgggccagacctcatactcctgggtgaaagctgtcttcccacctcagcctccctagtagctaggactatacaggtgtgcaccaccatgccctgctggaaacgttttgatttttcagctttttggggtttgcactgtttgacttcaagcaaatctttttttttttttttttttctgtttcttcttccactgtgaaagtaaatggattggatttatctctattttagagccataagaaagtgggagccttatggagggaggctgacctcagctggaaggactttttaccagaaggagaagatgtacataattttcttttggagcaggtaagaacaaggcttatgttttgctgtttgatagtagttgatctatttcatagaggaagtgaaggtaatttccttcgtattccagtcgttaaaattgcatcaaaataggaatcttggtaaagatgtccttttaagttcatgcttttaaagccactccaactgtgtggtcatcagatgattgatatttaaaaaaagaaaatgtaaaagacttagcaacctatagaaaaacaagctacagcaagcagaaatgaagttaacaaataaagcagggtgacagggccaaagctgtctcctgatttctgggtctgatggcaggccagaagcagccagaagttattctgtggggaatggagaccattaatacccttataaggtagaagattagagacaagcttatagcttgaaactacacaggtaaataagtgcaaggaagtagacacagtcttatacccagaaccttagctatcctgcctactgactggtaactagatccagaaatctacaaaacagaagaccccatgatcagtataatctggtcctataggaggatttgtgggctgttaggttgaggtaaccataaaacaaattagatcaagaaaagtaacagaaagaaaacaaaactctctcaaaacgttactgaaaatcaaaatcctaaaactcatgaggaaaactaaagctaagacagccaacaaaatcaggaataaggagaaaaaaaatcaccataggtaaaaagagaacaagaatgcaatctgaaaatgactttaaaataagtattttgttctggataaagatattatattaggttgctacagacattagctttctttttggttgtagtctggaacactgaagagcattcttgccacagcaataagaacctgcatgaagcataacttctgatgtgttactggacttagaagaggtggaagtaatttccttcaaagggacaaaaagaattaatgagggggaaaagccagagatgaaacctgaactgtgaatagtaattacatgtgaagggcatattgcccaaaggacacatagcccagtgggaagatactattacaaatgctgtcagatgtcatggaaaaagttgacttagtcccagttcagtattaccttggctcccagaagcagcaaatcaaaatgctctttggagaaacatcctcaacttaggtccccttattttctacaaatccaaattatttaaatatatgagttgacacttggtgttcatttaacatacaattaaagaagtaaagataaaagtaaacagacaataagtagtagatttagaccccatggacttgaggtaatggaattatcattcagagtataaaataacactatagtaaaagaaagaatcacaaaaatgagcaaacaagagactagtcaaaatggttaaagagatttgaaaagaaaagaaaaggttgggtgcagtggctcatgcctataatcctagcactttgggaggctgaagcaagagaatctcttgaagccaggagttggagatcagcctgaacaacatagtgagacctgtctctactaaaaaaaaatagctaggtgtattggtgcacctgtagtcgtaagctactcgagagactgaggcagaaggatcactagagcgtgggagtttaaggctgcagtgagatacgatcacaccactgcactccaacctgagagacaaagtgagagcctatcaaaaataaaaaataaaataaataaacaaaagccacacacacacacaccaaaatctgtaggtagctatctaagatatgttaatatgttaggagatttggaggaaagaatgagagaacatctaacctatctaattggagtcccagaaggaaaattagcctaaatggagaagaggcaatatttgaagagacagtggctgagacttctagaagtgataaaatatacaaatctataatgaaagcccatatatgcaatacaggataattatattttagtgaaactgcataataccaaagacagatgaaagattttaaagaagctgggaagaagaagcacattacttacctgcctccccctcaaaaaaaaaatacacaaaaaattagactttgcagtagcaaccatgaaagccagaagatggtagaataatctcagagtgctgagaaacgagcagtaaatgtagaattccctgtgcagctgaactaacctttaagaattagggcaatgcatactgagaaacttaacaacatacttctaaatacccatgggtcaaagaagaaatcaaacatgatagtaaaaaacatttttaactgaatgaaaacaaaaccacaacatatcatcgatatttagaaaagaagaaaggtcaataacctcagcttcaaccttaaagaattagaaaaataaggccagacacaatggctcatgcctataatcccaacactttgggaggccaaggcaggaagattgcttgagcccaggagcttgagagaccagcccaggcaacagagcaagaccctatcaccaaaaaaaaaaaaaaaagaaattagaacaataagaacaaatgaagctccaagcaaatagaataaaggaaataataaacattatatcagaaatcaatgaaatagaaaaatttttagagaaagaccagtgaaatcaaaagctggttctccaggaggtggaggttgcagtgagccaagattgcaccattgcactccagcctggacaaaagggcgagactccgtctcaaaaaaaaaaaaaaaaaaaaaaaaaaagctggttctttgagaagataaaagtgataaacctctagccagattgatcgtgaaaaaaagtttgaaaagaaggtacatattactaatatctggaatgaaagcggtaacatcagcacagattctatacataaaagtgggtgaggaaattttatgaataatctttatgtcaataaatacatcagccaggcgtggtggctcatgcctataattccagcactttgagaggccgaggcgggcggatcacgaggtcaggagttcgagaccagcctggccaacatggtgaatccccgtctctactaaaaatacaaaaattagccaggtgtggtagcacacgcctgtaatcccagctactcaggaggctgaggcaggaaaattgcttgaacccaggaggcagaggttgcaatgagccaagatcacattattgcactccagctctgggtgacagagcaagactccatattgggaaaataataataataataatgtagggtttatcctagaaatgtaaggtgggtttaatatttgaaaactgatgtatacataatagggaagatggtgaagtatacataatagagaagtatacataatagagaagtatacataatagggaagatggtgaagtatacataatagggaagtatacataatagggaagatggtgaagtatacataatagggaagtatacgtaatagggaaggtggtgaagtatacataacagaagtatacataatagggaagatggtgatgtatacataatagggaagatggtgatgtatacataatagagaagtatacgtaatagggaagatggtgaggttccaggattcaatccctccactgacacaactattgaactggcaagatctgttagagccaactgttttagaactgtggagtctcgttaaatacatgcattatcaacaccaggggattgcataatgaaaaaagagtctgataaatttcagtgaatttgggaattttgcatagaacttaccagtacccagcccagtggcagaccaccaggaaactggcatcacaccatttctggtgcagcttgctggtgccaggttgaacaataaggacttcattttccaaggattggggttgtgtcttttaattgacttttagttgactgagaggccagtgctggggctggctgttatttcaactctttcatgctgaagtatcttttagggctgtgactatcaaaagtatttaagcagtagtgttaacgggatctctggagtgtcgatttttttggccagaaacctctgtggccatggcacctttgcccgagttcttttcctgtgtccaggaagaatgaggtacgcaaacaaatgaagggtgaagaagagttttatttagtgttagaacagctcagaggagtgggtagctcctctctagtaggcaggttgtcccatggagtgttcagctctctgtagagaggaggctctggagaggatagctcctctccacaggcaggtcgtttggacatttctgcaggtctctgaagctctcagaggagagggtacctcctctctcctggcaggtcatctctgcagctctcagcagagaaggcattcttctctgcagctggtcctccaatcgtctctctaccctctttgtcctctgcccatctgctaccctgttctggctgagtccagggcttttatacctcagaggggaagaaatgcatgccaattggtccataggcagccatggttgggcctggaagaggcaccatgagcccctactccactctgctggactggcatcccagcccccagccttcaggtcctccctggcctgagggtggggccttactggggaccctgcccccttccacccaggactctgtctgcctcctgctgccattcatggccctggggcttggtcccaaccccactccaagatcagagagcaggcaactctgagcctgcagggacagggggtctttcctgggacacccgagggtgctgactgcagagacgcccaggtgctgcatgcctaggagggcagccacagctgcaccccagagctcccaccccaccaactcagaagaggcagggctcccccttttcccgtcccctgcctgctttgtggaacgggaggcccaggtctgcagccgcaggtcaggcagctgcgacagcacccaggaggggagatcctgcctgctccctcaagaaaggctcgaatccacagctgcagtttgggtgggagggcagggctcctgcctgctccaaagagcaggaggcttgggtccgcagctatggtttgggtggctgcagtagcacaggcagcttccatcccaactcagaaggggcagggctcccaccggctccatgcagtgtacggccccagctgcacctccctgctgcagccaatagtatctctctctctgtctctctctctttctttctgtctccagtctctctgtctcctctcctctcccctctctcctctttcctccttctccactccctctccctgagtcctctttttttgttaatttaacttttattttaaggtcaggggtacatgtgcaggtttgttctataggtaaacttgtgtcatgggggtttgctttacagattattttgtcacccaggtattaagcctagtacctattagttatttttcctgatcttctcccttctcccaacctctgccctctgataggttcgtgtgtgttgttcccctctatgtgtccatgtattgtcaccatttagctcccacctataagtgagaacacgcagtatttggttttttgttcctgcattagttcgctaaggatcacttggcctgggaggtcaaggctgcagtgagccatgatagtgccattgcactgcaacccgggcaaaagagcaagaccctgtctaaataaataaataaataaataaataaataaatatgagacttcagtttaaaagaaaaaaaaagcaatcggaggtcaaggctgcagtgagccttgatagtgccactgcactgtaacctgagcgaaagagcaagaccctgtctaaataaataaatatgagacttcagtttaaaagaaaaaaaaggcaaaataatatatatataataaaatgaatatataaaaatgtttatagtttgaaaaatgaggttgaaaaatacttggcctgtatcttgacttacagtttgcttaaacagcttatggccttcatgttgtgcttttttgcatatattggagcatcatggattggatgtatagttaaccaatactaaatcagaaaaattgtaatattgagccatgtttctaaaatcttatggagctgggtgcagtggtgcacactgtagtctcagctgctcgggaggctgaggcagaaggatctttgagccccagagttcaagtccaacttggcaacatagtgagaccccaagtcaaaaataaataaataataaaaccttattgggaaatataatttagagatgctacgtaagtggtagaaacggaacaatcagatgacagaactcaagactgtggttttcactttgtggattggggatagggtataggaccataccagagtattcaagagtattagagaaaaccttatgtgagtaatccttaatattttcatctttatggtttttgtataatgaagccacataaagcaaggcatacctatgtacttcatttctttagtcctttgaaaattatgaataattttgattatagattttttttttctttttgagacaggatctcgccctattgccaggctgcagagcagtggcacaatgacaattcactgcagcctcaacctcccatgctcaagcaatcctcccatctcagcctcctgagtagctgggaccacaggcgcatgccacaacacctggctaattttggtatttgtgttggtagagacggggttttgccatgttgcccaggctggtctcaaactcctgaactcatacactcctcctgccttggcctcccaaagtgctgggattactggtgtgagccactgcgcccagcctgattatagattttttaaaactatgtatctaagtgctaaacaattatagcatcatttctcacacctatattcgaaatggccacaacttaacaaagccaaaactatctagttttgatagctgctgagtaccaatactaatattaaaccataggttgcagaaagagagtgaaattgtacccttttctagggctcctatcctgccttaaagagctatgttgcagctaaggggaagattgaagctcaagattatttgcgtgtaaccatagcctagagataattatagggggttattaccttcttttttaagatacacggtatgagaagttggaaaaatattcagaaggataatggactgacagtttttcaaaactataatacgaacaggttgggcgtggtgagtcatgcctgtaatcccgtctttgggaggccaaggagggcggattgcttgagctcaggagttcaagaccagcctgggcagcatggcaagaccccttctctactaaaaacacaaaaaaatagccaagtgtggtggtgtgggtctggagtcccagctactcaggaggctgaggtgggaggattgcttgagcccgtgatgtggaagttgcagtaagccaaactactccagcctggatgacagagcaagaccctgtctcaaaaaaaaaaaaaaaaaaaaaactacaaacataaaatagcctctgctgatcattttgattccatgtaaaatagaagacgtaacctatgactttgttcttctctcaggatgacaataacatagaattatattaatatattaatatgttccaccttttatgtttcagaagttggacttcatagagtctgacagtccctgttcctctgaagcactttcaaagaaagaactgtctgccgaagagctgtataagcgactcgagaaactcattattgaggacaaagcgaatgatgaacagatctttgactgggtagaggtataaagactatgtcaccttccctgatacctctacaggaaagattcttgtgggatccccttaattcgcttacctatcagttcacttcatgaatttttatttttatttttttttatttatttatttttttatttatttattttttttttttaattgatcattcttgggtgtttctcgcagagggggatttggcagggtcacaggacaatagtggagggaaggtcagcagataaacaagtgaacaaaggtctctggttttcctaggcagaggaccctgcggccttccgcagtgtttgtgtccctgggtacttaagattagggagtggtgatgactcttaacgagcatgctgccttcaagcatctgtttaacaaagcacatcttgcaccgcccttaatccatttaaccctgagtggacacagcacgtgtttcagagagcacagggttggggttaaggtcacagatcaacaggatcccaaggcagaagaatttttcttagtacagaacaaaatgaaaagtctcccatgtctacttctttctacacagacccggcaaccatccgatttctcaattttttccccacccttcccgcctttctattccacaaaaccgccattgtcatcatggcccatccccaatgagccgctgggcacacctcccagacggggtggtggccgggcggaggggctcctcacttcccagtaggggcggccgggcagaagcgcccctcacctcctggatagggcggctggccgggcggggggctgacccccccaccaccctcccggacagggcggctggccagacagaggggtcctcacttcccagtaggggcggccgggcagaggcgcccctcacctcctggatagggcggctggccgggcggggggctgacccccccacctccctcccggacggggcgactggccgggcagaggggtcctcacttcccagtaggggcggccgggcagaggcgcccccacctcccggacggggcggccggccgggcggggggctgacccccccacctccctcccggacggggcggctggccgaccccccccccccccgcctccctcccggacggggcggctggccgggcagggggctgacctccccacctccctcccggatggggtggctggccaggcggggggctgacccccccacctccctcccggacggggcggctggccgggcagaggcgctcctcacttcccagtaggggcggccgggcagaggcgcccctcacctcccggacggggcggctggccgggcggggggctgatccccccacctcccttccggacggggcggctggccgggcggggggctgacccccctcctccctcccggacggggcggctggccgggcagagggatcctcacttcccagtaggggcggccgggcagaggcgcccctcacctcccggacggggcggctggccaggcggggggctgatccccccacctccctcccggacggggcggctggccgggcagggggctgaccccccctcccccctcccggacggggcggctggccgggcggggggctgaccccccacctccctcccggactgggcggctggccgggtggggggctgacccccccacctccctcctggacggggcaactggccgggcagaggggctcctcacttcccagtaggggcggccgggcagaggatcccctcacctcccggacggggcggctggccgggcggggggctgacccccccccacctccctcccggacggggtggctgccgggcggagaggctcctcacttcccagacggggtggctgccggacggaggggctccccacttctcagacggggcggttgccaggcagagggtttcctcacttctcagacggggcggccgggcagagacgctcctcacctcccagacagggttgcggcccagcagaggcgctcctcacatcctagacagggcggcggggcagaggcgctccccactcagacgatgggcgggtcaggcagagatgctcctcacttcctagatgggatggcagccgggcagagacgctcctaacttcctagatgggatggcggctgggcagagacgctcctcactttccagactgggcagccaggcagaggggctcctcacctcccagacgatgggcggccaggcagagacgctcctcacttcccagacggggtggcggccgggcagaggctgcaatctcggctctttgggaggccaaggcaggcggctgggaggtgtaggttgtagtgagctgagatcacgccactgcactccagcctgggcaccattgagcactgagtgaacgagactccgtctgcaatcccggcacctcgggaggccgaggctggcggatcactcgcggttaggagctggagaccagcccggccaacacagcaaaacccagtctccaccaaaaaaaaacgaaaaccagtcaggcgtggcagcgcgcgcctgcaatcgcaggcactcggcaggctgaggcaggagaatcaggcagggaggttgcagtgagccgagatggcagcagtaccgtccagctttggctcggcatcagagggagaccgtggaaggagactgtggggagagggagagggggagggggagggggagggggagggggagggggagatgaatttttaaccttaattaaattagtttttaaatgcttttgttttgccttccttagaaaagagtaacatttttctcaccacttaaggggttaagtaatgcttgagattaacttctaattcacattaaaattaagatgaaaaagcagtgttggcacatgtaaaaatagttacatgcttctgagtaagtagtcattaaaatacactgcagttgtggtgttgttctttcatagattgagtagatgatcttaatatggattatttattgaggaataaaatatgtttttaagtggttatacttccaaatgtacaagtacataacactgtataattgaatgagtaaaggataggcagtgggaaggaccctgaaaagtaaatactgctaattcaaatatttgcacatagaactggcaatagccaaattatttttcaatgaattggacatttaattttagcaagaatgtgcaaaaatgtgattcatctggtctgggtgtgatggttcatgcctgtaatcccagcactttgggaggctgaggtaggcagatcacgaggtcagagtttgagactagcctggccaacatagtgaaaccccatctctactaaaagtactaaaaaattagctgagtagtcccagctactcgggaggctgaggcagggatcctgtagtcccagctactcaggaggctgaggcaggagaatcgcttgaacctgggaggcagaggttgcagtgagctgagatcgcaccactgcactccagcccgggtgacagtgcaaagtctcaaaaaaaaaaaaaaaaaaaaaacagtgactcatctgttcttagtgccagatcagtcctgatgttcaagagatcatttatctgatacgcaagggtatctttttttgttttttgttttttgttttgagatggagttttgcacttgtcgcccagtctggagtgcagtggtgcaatcttggctcactgcagcctccacctcccaggttcaaacgattctcctgcctcagcctctgcctgccaccatacccagctgatttttgtgtttttagtagagacacggtttcaccatgttggccagattggtctcgaactcctgacctcaggtgatccatcctcttcagcctcccaaagtgctgggattacaggcatgagccactgcacctggcctgttttttgttttctcaagacaaggtctcgctctgtcacccatgctggagtgcagtggtgcagtcattgcttactgcagcctcaaacccttgggatcaagcagtcctcccaccttagtctcccaggtagctgggaacacaggcatgtgccaccatacccagcttttttttttttttttttttttttaagagatagggtcttactatattgcccagactggtctcaactcctagcctcaagtgatcctcctgtctcggcctcccaaagtgttgggattacaggcatgagcctctgtgcctggctgagcaaggtatctttaattgttttatttctttttgacttcaggctaatctagacgaaatccagatgagttcacctacattccttagagctttaatgactgctgtttgtaaagcagctattataggtaagtaacatttctgaaggcagctcataacatctgaaatccccattatgtcaactactaagtatacagtttgattttacattgttttcaaaacttctcctatgtagctcacttttctgtgcactgtcctttctgtctgtgatgcctggttgtctcaagcgtggagacaaatagctgctccgcctacagagaacccagatctaaccagctaccacatgccttgcatgctccttgggttgtttttcactacgttgcgtgtagctttttctttatcttttcacttctaacattcagggccgcctcctccttccaataatgaattataatgaacaggttgaatattcttaatctaattatcagtatagggttattctcatcaaaaaagtcatgttatataagtacatacatgaagaaaaaaatatcaacagtttgtcctgttctttgttgactttatttgatatgataagacaattttattggcttatgaattgttaatattgataggattagggtcagtagaaatcccaaatattccaagctgtatacaatgtttaacattattcaatgaagacatctctttagtttcagatagaaattcatacttctgtcactgaagcgagaaaaaaaaattcatcagtgcaaaggtgtctcagaatttcaagtctgtctctattttgaagatggctttctgccacttaatatagcttcagaattgtaatttaagatttgcaatgaatttattttcaatgttctttaatgagataaataacaaagctaagtagaaagtcttcatgaaatttttaaaaatcattttcagtatccatagaaccatcataagactttcatgttttaaaattcgagttgggaagtccaaaagctgtttggtttttgttttcttgagatggtgggggtcactgtgttgcccaggctggacctgaactcctgggcttaagcggatcctatcgcctcagcctcttgagtaactggaattacaggcatgagccacgatggccagattttaaaagcaaaatctgcttttaaaaacaaaattgtgtcttagtgataacttacagataatataaacccgtatgtgtctttgtactgaggatgcttttcatttctcagcccctttttatcattcctttccctcaaaaggcctagattaggtatgttatctgccactgccacagttagtttttatcctagtaataacaaaatggttccaattattttagccttctgaaaagatttgtattaagtgtcactttaatttccttttctaatgttgcttttttatgttgctttttttaaatactcacttgaaattcctactccatgtttcatttatttttgattgacaaattataattgtatatgtttatggggtacaatgtgatgttttgatatacatgtccaatgtggaatgattgaatcaaattaattaacatatctatcacctcacttacctttttttatggtaagacatttgattaattttgcttttgtagtttgtcataaaaccacagtcactgtttcattacaattaaagataattgggtacgctactcctgagggaaaccagcattcaaaatgcatcccctccatagtttttattatttgtgagagaatgtctcattaataatttcagagcattttggatttcaaaatatttgccttagaccttcttgcctcctcttctcttgtagagccatatgggtcctttgtactcagaaaattgaaaatgagccaggttgcagtggctcatgcctgtaatcccagcattttgggaggccaaggcagaaggattgcttgagcccaagagttcaagaccagcttgggcaatatagcgagaccctgtctctattatttaaaatctaaaatagaagaagaagaagaagaagaaaggccaggagcagtggctcatgcctgtaatcccagcagtttgggaggctgaggcgggtggatcgcctgaggtcaggagttcgagacaagtctgaccaacatggtgaaaccctgtctctgctaaaaatacacaaaaaaattagtcaggcctgggagcaggcgcctgtagtcccaacaacttgggaggctgagacaggagaatagcttgaacctgggagacggaggttgcagtgagcttagattgtgccactgcactccagcctgggcaatagagtgaggctctgtctcaaaaaaagaaaaaagaaagaaaattaaagataattctatgttaactccttaaatgtaattcctagttcttctatcacctttagccgactcttctaccttcagagtggacactgctgttatcaagcagagagtgccgatcttactcaagtacctagactcagatacagagaaggaactgcaagcactttatgcactacaagcatcgatagtaaaacttgatcaacctgccagtaagtttatctcatgttacagttaatctaaccaatgagtgagatttatccaagccaggacttagagatgatttagggttcgaacaaaggacaataaaagaatcactaataacacaaactcatataactaactttaataaatttgaatttggccgggtgcagtggcttgcgcctataatcccagcactttgggaggccacggcaggcagatcacttgaggtcaagagttcaagaccagcctggccaacatggtgaaaccctatccctactaaaaatacagaaatggctgagcacggtggctcacacctgtaatcccagcactttgggaggccgaggcagatggatcatgaggtcaggagatcgagaccatcctggctaacacagtgaaaccctgtctctactaaaaatacaaaaaattagctgggtgtggtggcgggcacctgtaatcccagctacttgggaggctgaggcaggagaatcgcttgaacccaggaggcggaggttacagtgatccaagagcatgccactgcactccagcctggcgacagagcgagactctatctcaaaaaaaaaaaaaatacaaaaatacaaaaattggctaggtgtggtggcatgtgcctgtagtcccagctacagctactcagaaagctgaagcacgagaatcacttgaacctgggaggcggagtttgcactaagccaagatggcgccactgcactccggcctggacaacagagcaagactctgtccaaaaaaaaaaaaatgaatttgttatatgtttgtatgaaaatatcacaacaagaaaactatttagattaggttatttcatccccattccagggcaggcctaataaaactttccacagtgatggtagtatatatccataccattgagtatggtaatcatgagccacatgtggcaattctatacttaaatatgtctgttgtgacttaggaactgaattattgactttaaatttaaataaccatgtttgactaatagcttccatattggacaacacaggtctagggcatgaaaatggttaatgatgttgaggatgatactctagaatctttagacacccaacaaagaccctaagtgtagtgtatttaccatgctatatttactaaggagtttcagaatagtttttagttaagggttatgattaattcttggctaatgaaacaaagtaacctgtacacttaagtcttagtgatacttggtgttaactaatgatttttattacatcttgaaaattcagttggtatttgttaaagcgggcagtacatagctattagagagagcactcaagtagttctttggtacttccttattttcgcttttgtaaaattccttctttcctagtcctgaatcgctcttggagataaaggaaaagatgaaagcaaattatccttatagtgtaactgaagagacaatctaccatgaatcagataatttgataatattagcttaactaatataattacaaagataagtctttttaaaaaaaggccgaggcatgcagatcacccgaggtcaggagtttgagaccagcctggccaacatggtgaaaccccgtctctactaaaactacaaaattagctgggcgtggtggcgcatgcctgtaatcccagctacttgggaggctgaggcaggagaatcacttgaacccatgaggcggtggttgcaatgagccgagatcatgccactgcactccagcctgggcaaaaagagcaaaactccatttaaaaaaaaaaaagttaatacgactcatgataaacctaatattgattagcatttattgtttattccactgcctccctccattaatataaatgatcggagagctgactataataactataagctaataacttattatatatgataactataattctcagttttactatgagagtaaaaccgagaattaaaatcacacggatagtttggacgtttaaaacagtaaataacaggtgtagtttcactggataaaatccagatgagatagcttttactcatgttttccatgtgaatgatcacctcttgttcttttttgagacggactctcgctctgtcacccaggctggagtgcagtgatgcaatctcagctcactgcaagctccgcctgccgggttcacgccattctcctgtctcagcctccctagtagctgagactacaggcacccgccaccatgcccggctaattttttgtatgtttagtagagacggggtttcactgtgttagccaggatggtctcgatctcctgacctcgtgatccgcctgtctcggcctcccaaagtgctaggattaaaggtgtgagccaccgcgcccggccacctcttcatttttaaaacaacattacaaggaataaaaagcatatcctgcctttctcccttcccccaaattttgtaaaaataatacagtaaacttgcagcgcagaaaatagtaaaaagaaagtaaaaaactactcgtatttaaattttatagggtttagattgagataaacatgatatgaaacagcttcactggtatcagaagatagttcagattgggccgggcacggtggctcacgcctgtaatcccagcactttgggaggccaagatgagcggatcacctgaggtcaggagttcgagaccagcctggccaacatggtgaaatcccttctctacttaaaatacaaaaattagctgactgtggtggccggcgcctgtaatcccaggtacttgggaggctgaggcaggaaaattgcttcaacccaggcaggcgcctgtaatcccaggtacttgagaggctgaggcaggaaaaattgcttaaacccaggcaggcgcctataatcccaggtacttaggaggctgaggcaggaaaattgcttaaacccaggaggtagaggttgcagtgagccaagatcgcaccactgcactccagcctggggacagaacaagattgtctctcaaaaaaaaaaaaaaaaaaaaaaaaaacagaaaaaaagttcaaattgtacaaaataataggaataaaaaagaatttagactgcttcaatctttttttcctcttctttaaacaagttgttgggctgtttatactgtcaagagcaagtatggtgaattgtcattattgcttttttctgggggaattaatgcacatttattcagtcattcattattttgaaatatattcttttcctcataactacagtgtcccaaagcttatagtttattttcacctccttgcagatttgctgcggatgttttttgattgtctatatgacgaggaggtgatctccgaggatgccttctacaaatgggagagcagcaaggaccctgcagagcagaatgggaagggcgtggctctgaaatctgtcacggcattcttcacgtggctgcgggaagcagaagaggagtctgaggataactaaaacttcaaatacacaaaatgaaacaaaagaaacaatttaagtatttttttaaaaagtttcacgtcttcgccaatcacagtgcagcaaggccaattctcgcagaaacccccacgtgtgcacgagtgggagaggggaaagagaaaaaaaggtgatcatggaggaaaaaggtactggataaaagtaaacttcaaaccttagggcgggagcactaaaaccaaaatacatgtattatttatagaaaatattttctgttttaatcttttctttttaaacaaggactcatacttaaaaaaatgtttagcaaaaaaaaaaaaagttgagaacttttaatttattttaaggactgcaaatgccagtgtaattttttaatttgcagtttctgtaaacaacttgtataatagaaaagcagagaaataaatttccctccccttcaagatgcacctcatgtttgttttaaggtatagcatttagtccagatttgagaaagtttggggtgaacaaggtaagaaagatttttttttttttggcatcaaatctttctgcctgcctctcagcttgcttcagaaaatttaaaaaatcacaatagtaatcaaaacatacataacattgaaacagaaggaaatgctgtggaccacagaactccaagaattgtttaaaaaaaaaaaagtgctaccctgagaaaagtactcttaatactcttgaaatctttagagcaactttaaggcttgtaaatacatagaacaaatatttaaaaaaacaaaaagaaattgactcagtactatttcttttcactttgaaaatataaagaacaaaataaagacaaacattgcaagtttaaaagaaagtaaagtgacttctcctttggacagctgctgcatgtgtgcccattcctgggggtgctgtctggctatttattgtctaattcaaatcactcctgaggggagagagataaaacgagagagagtgagagagtgtgtgtatgtgcgtgtatgcgcacgtatgtgcatgcacatgtatgtatgtatatgtctctactcactgaaaaggcaagctactttgtgggtaaggagggcacttgtgcttgggtgggaatgccccactgggagtccagtgaaacttgtttccaacactaactaaaaatgcattcaggacagtaggcctcaagggcagtcctttagataactaagttttccactctgtgtatcaggactcaggacaataattcactttgagactgccactaccactgattttaaaatcttccatcaattgcctgcaatgcttaagaaacccaaagatgtcctctaaagaatgaataaaaccaaaagctatattatgcttttacaaaagtgggggtgggatttttataaaagtgggggtggggtttaaaatcaagccaataccatgtatgcaaatcacattgtctgccaactccaacctcattcaagccattctggtgagtataaagctgactgtgggcctctgcttgggcctctgcttctcctacagatattggagtgctgtgctttctaattttcccaccctttcatgaagtcgcagtctctacagatggttttccatttcagttgtttgtgggccatcaacctacaaaatgtatttatgaagaaagccagactactcccagataaatagtctttttcttttgtatctggataacaagagatttctgctggcttccatctctgaagaaataccacattaagagacttggcaagacttgtgaaacacaagaacaaaattttctatagcaataaaatgtttctctgaagtgtagttgaacacaatacaagatcccactacataagcccacagaggccatttttcagtggtggaatgctgtatgccactggtccccaatgcacaacctagatccctcacatgtgcagttcacaatgggttcgcgctcctgtgagaatctaatgccaccactgatctgacaggaggcggagctcaggtggaaatgcttgctcacacaccactcaccttctgttgtgcagcccagtttctaacaggccatggaccagtacgtgtccttggcccaggggctggggacccctgctgtatgctgcttttgttttgttttgagacagggtgttgctctgtcacccaggttggagtgcagtggcttgatcatggctcactgtagcctcaaactcctgggctcaagcgatcctcctgcctcaccctccccagtagctgggactacaggcacacaccaccacagaatactattgttgaaggaccaagtcctgaaagtcttttgaagggtatgcgacagcatcagctgtaaaagatggggcctgaaaagctgttttggagcctgaccacaggctttgcctgggatccctcaattgggagaagcagcctggttctatgatcaactgagtaaacaacctccagaatcaaagtgcagaggattatgatcaaggaatcgtctctgagtgatagaagtttttagaaggtattgacagcactcaagaggttgagggaggggagtttaggggaatacaggatggtaactgcctcttgagaatcagtagctgttttttgcaggggtctgaccagggagggatttcaggtagtagagatggcctagttatcagtattttacatattaacaagtgtaaggaatggaggaaagagagaaatatttttgaaagaacaattaaagggttgaaaaatatcttaagatataaacatctctagtacaatgacagaaataatgtttgaaatcttacctataacatgaagtatgttgaagagactacaaagtaagctttgagtatcttgttgctgtggacacggaatgtgtgctaggattagaagttgcctaatgacaaaatatgagcaaagtaagataattgccccctactaatatccactgaactgcaaaacagtgtcaagattattaccctctctagtctttttactggaaaatagggtttggcaatttttgttttaatataataggtgacattgccaacattgatatgccagcactcctttgagctgtagcaaaagctccttcaccgatttcaaatttgggagcaggtccaatgccttttttttttttttttttttgagatggagtctggctctgttgcccaggctggagtgcagtggcgtgatctctactcactgcaaactccgcctcccaggttcaagcagttctgcctcagcctcccgagtagctgggattataggaagcgccaccacgcccggctaatttttttgtattttaagtagagatggggtttcaccatatttgttttgccaggctggtcttgaactcccaactccaggtgaaccgcccacctcggcctcccaaagtgctgggattacaggcatgagccaccgcacctggcccaatacctcttttagtgcatttattaaggtgcttatacctattttctaaccagtcaacttatggctattcagtaaatgaacattttttcatttctaacaaaggaaaatgatactaattttcaaaatgaacttattttgggttcttgtgtaggccaataagctagcccataactgcatcatgagcttgttttgttcaaccaatatttaactcaacatctactgtgcactaagtggagataggataacagtgaccacagtaggctctgctttcatggatctcatattcttcatgaaaacagaaagctagaggtcgttaacatgctgcatcagcatcgcatcccactaagaagtatctgctccttattactttggcagatctttgtttgttttttctttatatttcaaaattcattctaggctgtttgcaacaattaaatccaaagatagctttaaaaccactctccaaacaagttattttggagtttttgacatactatcttgtttcaaatggctctttttaagtcaatagaattctaagttggttggggaaagatcctaggctactgtatctaattctgttttcatcactcaagttttattatttaaaaaaaaaatagaggaatccagtttttcaatttcaactatgtcattagcatgtacttccatattctccattttgtagggagtaacattttacattactttttgtttgctttttcttttcttgagacagtcttgatctgtcgcccaggcgggagttcagtggtgtgatcttggctcactgcagcctccacctcccaggttcaagtgattctcctgcctcagcctcccgagtagctgggattacaggctcaggccaggtagggagggatatgctacatgcccactggcataaaatatcccatatgtccctcaaaaggaaaaatgatcatctgttagtttggggacttaaaaaaaaaacctgacatcactgtgtattaccaaatcatgagatgatttatacattaagctacagagaatcatatgccaaatgttattcagttaaagttttattttgaaataatttcagacttacagaaaagttgcagattttacagaaagttctatatacccctcatccagttccctttataataacatcttatattgccataggacatttgtcaaaactaagaaaccagctttggtatgttgcttgtaactaaacttaagagtatttagattttcaccaatgtcccttttctggtccaagatgcagtccatgatactacattgcatctaaggaatcatttccttagtgtcctctggactttgacagttttttggtctttttcatgactttgacaattttgaggagtaataatgggacattttgtagaatgtctgtcaatttgtatttgtctggtgtttttctcatgattaaagtggggttatgtattttggataaaaataactgtatattgtaatcccagctctttgggagaccaaggcaggaggattacttgaagctaggagtttgagaccagcctgggcaatataggaagacccccccatctctacaaaaatacttaaaaattagccaggcatggtgatgcacacctgtagtcccagctgctcaggaagctaaggcaggagaatcacttgagcccaggagatcaaggctgcagtgagctatgatcatgccactgcatttcagcttgggcagcagaatgagaccctgtctctaaaaaataaaaacacaaataccatataaatgaagttctcttctcatatatcagcaggtacaagatactcacatgataactttatttggctaagttggtgtttgccaggtttctctatagttacttttctttcccccctttcttactctagtctatatgaaagccagtcactaaatccaacccacacttgggaagagagatgggagtaagagagaattaagctttacttcctttctagagtgggaagcgtctacttaaattatttggaattttcccacaaggaagatgtctctcttctctatttgtttgtttagtcactcatatgtatttatatgtgtgtatgtataaatgtacacacatgggtatgtatatatcagtatgggctcatgtatatttcatactttgaattataacccaatagtacatgattttgttgttcacattgttccagctttagccattaggggctctttcaagttggcttatgtgtcccttgacattccctgatacttttgtttttagagcacgtactttctgccatcacaagatgccacagacatatcttgtattttccctgcctcagtcctagaatcagccatttctacaagaatccctggtttcttctaggagaatgggatttagaaaccaagcttttactcactgggtttgcatgttgctattggggcatctcagcctcttggtctgccaacattttaaacttcattttcttgccaggcgagtaagctgctttcacatggagcactatgaccattagaaaacatagttctgggctgggcgcagtggctcacccctgtaatcccagcactttgggaggccacaataggcggatcatgaggtcaggagatcgagaccatcctggccaacatgccgaaacaccgtctctactaaaaatacaaaaattactgtgcatggtagcgcgtgcctgtaatcccagctacttgggaggctgaggcaggagaatcgcttgaaccagggagtcgaaggtttcagtgagccaagatcacgccacagcactccagcctgacgacagagcaagactctgtctcaaaaaaaaaaaaagaaaacatagttctggtgtgtgtgtgtgtgtgtgtattactttgggccaagcgcagtggctcacacctgtaatcctagcactttgggaggccgaggtgggtagatgacttgaggtcaggagtttgagaccagcttgtgcaacatggtaaaaccccatctctactaaaaacatacaaaattagccaggtgtggtggtgggcacctgtagtcccagatactcgggagactgaggcaggagaactgcttgaccccgggaggcagaggttgcaatgagccaagatcccaccattgccctccagcctgggtaacagcaagactgtctaaaatataataataataaaataaaacactctggtacccaaaagactcaagcctatagatacttcattcattttctgctcatcttacataggaaaaagtagagggccaggtactgtggctcacggctataatcccagcacttcgggaggccaaggtggccagatcacttgaggccaggagttcaagaccagtctggccaacatggcaagactctctctctactaaaaaatacaaaaattagttgggcctggtggcgcatgcctgtaatcccagctactcagaaggttgaggcacgagaatcacttgaacctgggaggcggaggttgcagtgaaccaagatagggtcactgcactccagcctgggtgacagagtgagactctctcaaataaataaatcaataaatattgaactgtttctctctttccccattatgattatttgttttaatttcccttagctagtaatatttagagtctactaaggtaccaatacagagcagtgttaaaatgttaactcagttaaacaataataatggaaatcgcgaaataatgaaaagttaactgatgataaaagcgctgcgtatcaaaacttgagataaacctaaagtaagcccaagagttcgaggttacagtgagctttgattgtgccactgcactccagcctgggtgacaagagttaagaccctgtctcttaaagcaaaaaagctgagtaatacttttaggtaaatgtaaagtctttaaatacatttgtttagaaaccataccagtttaaagtaaatgaattagggtatcagaagaaccaactgggggcagggggatgccacctaagtgaatatcaagagtttactcttccttctataggaagaagttgtgtgctgagaggaaggaggtatagactagaattgggagatctgtgctctaatgctaacattgctgttcacggaatatttgactacctgcttggtatgggccttcctctcttctctagaaagggcttactcttgccaaccatatgagcacatccagaatcactttaaatactgcctaccaagcttaacaaagacaaaaggttttggtaataataggatattaccagcttttcaatgaagtaaaaatatcaagaatttctgaaatttcaagtcaccatgagttgaacttgtactatcagtattccttttcaatccttctgtcatatttacctcttattggtaaatacatgtcctctgacctgaagtcctgggaaactatctttgccaaatttcaaaaagccaccctgccatagcttcttcctacattgtagaataaatagtgctcaacactggctgtgtgttagaagtacctggaaagcttttaaaaatacaaatcctggagccccacctcagactaattatttcaggatctctggggatgagacctgggcatctctctctctctctctctcattttttaaatttaaattccttaggtgatcataatatgacccagggttgagacgacactgaaatggtgaaaataacctgattcagctaacaatatagataacaatttatattttcaggtatttcagaaatatattttaactgcaagatgttggacaaacaaatggacttacatatggcacatactttgaaaatacagtgttaggagagcatataatggggaccctgtatacactgggggattagggaatgttgcccttaggagtagaattttaaacaaaaatgtgaagaatcaaatagttaaggggtctgttgaaatagaggagatcttgtgtgcaaagtccatggttgggggaacgcatggtgtatttgagaatgaagaaagggtgacagtatggcgagagttcattctcacatgcaaaagtcaaatctgaacgtgcccagtgacaaattaatccagacaaactttttctggacaaatagagggaaagaaccttttttttttttttttttttttttttttttttgacagagtcttgctctatcacccaggctggagtgcgatggcacaatctcagctcattgcaacctccacctcccggattcaagcgattctcttgcctcagcctcccaagtagctgggactacaggcatgcaccatcacacccggctagtttttgtatttttagtagagacggggttttaccatttgaccaggctagtctcgagctcctgacctcaggtgatccacctgccttggccttccatagtgctgagattacggcatgagccactgcgcccagccatggaaagaacttttgaaagctgccttatactttcacttagcagaattcactagagatgaactttagttggtttttttaatagttactcagcaaaaagaataacgatgctttcaatcatttccaattcgcaattagccacacagcatgttagaataactgtaggctctttggagtaactagttatatctaacctcagggttagtcaaagtatgggccttggactagcagcatcaacatcacctgtgagcttcttagaatgcaaattcacaggccccagcctactaaaaccgaatctgaagagatggaagatcccaagaaatcgctataagcgcttcagatgatttttaggcacactgaagtttaagaaccactgcctaggagtatttcacatctctgccagagtatagtcctcttcaaaaagctaacacaaaacaagttgtatgctgcttttagaacctttcggcttgtactttcgcatctacaacacagaaacaataagcccttcctgatttccttagtaaactaatagtaaattaatttcctaggcaatgcaggatggcatctaattggtcttcatactaggcttctgacatgtaaggtggtgctgcttccttttaccaggtagggaactgagtaacacagaagtcatgtacctagcaagtgtcagaagcaagactggcacttggttttctgggaggcagtattgtccgaaaaataactctcaccaccaagagttttcttttggggaaaatgacgtagtggatatagtttggaatattggcattggaaaaataggagcattagtatagccctgctggggttgctgaaacctcggcttccatttatttatttatttttttatgagacagggtctcactgtcgcccaggcagtagcttagtgctgtgatctcggctcattgcaacctgtctcctgggctcaagggagcctccagagtagctgggactgtggctaattcttgtattttttgtagagatgggttttcaccatgttgcccaggctggttttgaacacctgagctcaagccatcaacccaccttagcctcccaaagtgctggggtcgcaggcatgagttactgcgcccggccagttgcctcatctataaaacaaaagtaacatccacttcatggggttgtcttgaggaattaaaggagatcggataaagtgcccagcattctgcctgaaatacctagggcccttcctgtctgcgtccagtgttctttttctgccacactcttactaccttagtcataatcagttacatacagttaggctatgccattttcagaactgtaggagattatagcttacctatccacatttctttctttttttttttttttttttttttttttgagacggagtctcactctgtcacccaggctggggtgcagtggtgtgatcttggctcagtgcagcctccacctccggagttcaagcgattctcctgcctcagcctcccaagtagctgggactacaggcatgcgccaccacgcctggctaatttttttgtattttcagtagagatggggtttcatcatgttggccaggctggtctcgaactcctgacctcaggtgatctgcccgcctcagcctcccaaagtgctgggattacaggcgtgagccaccgtgcccagcccacatttatttaatattctattgatcaaatttttaaaattgttttactttccctagaaaatactatgaagtctttttttttttttttttttgagacggagtctcgctctgttgcccaggctggaattcagtggcaccatctcggctcactgcaagctccgcctcccaggttcacgccattctcccgcctcagccttccgagtagctgggactacagacgcccgccaccatacccggctaatttttttgtatttttagtagagatggggttttacctatcatgttagccaggatggtctcaatcttctgacctcgtgatctgcccgccttggcctcccaaagtgctgggattacaggcgtgaaccaccgtgcccagcaatactatgaagtcttaagtgtctatccctactgctaacagacctgggaatagaggcttttagctcccacttctcctgggattcaatagaacattgcaaaatccttttttttttttttttaacacaaggatcaatgcttagtgtccttttcaagttgtttattgccctacctagaaagaaaatgactattttcctacaaaatcataatgaactcctaaaaataccaggtacttagaaatgcatgttctgtcacatccagctctggctttgttcctaatttaggggatgccaactactttgggcaaagagacagctataccaaacaagctggctgctcagaataaattctaggccgggcgcgatggctcacgcctgtaatcccagcacttcgggaggctgaggcaggcggatcacgaggtcaggagatcgagaccatcctggctaacagggtgaaaccctgtctctactaaaaatacaaaaaattagccaggcctggtggtgggtgcctgtagtcccagctacttgggaggctgaggcaggagaatcgcttgaacctgggaggtggaggttgcagtgagccgagatcacaccactgcactccagcctaggcgacagagtgagactccatctcataaataaataaataaataaataaattccagctttttcttattaagtgtcatagactcaaccagcagagtgtaaaacagagacacaaagattaggataatcatgtgggggtttcttcttgctcaaaatgttttatcttttgagaagagcaggaatatcaccaataaaatgtcaggttttaaagttgaacaatcctgggtcttgatatacatggttctcaagaattatgctactaattccaaagtttggatggttgaaaatttacagccttgtgcaagtgtcttaagagtactcagagccagccaggcgcggtggctcacgccagtaatcccagcactttggggaggccgaggcaggcagatcacgaggtcaagagatcgagaccatcctggccaacatggtgaaaccctgtctctactagaaatacaaaaattaggtgggcgtggtggcgtgtgcctgtagttccagctactcaggaggctgaggcaggagaatcccttgaacccgggaggtggaggttacaatgagccgagatctcgccactacactccagcctggcaagagagcgagacgccgtctcaaaaaaaacaaaactcagagccagtatgtattggtttttgaaaagtttgcattttctcatcaccatgcagttgcgttttgatttataaaaggaaatgatccttttcatcaccatctttttaaaactcttttcgtctctttattttttaaataaatggatccaatttcgtgattctgatttttaaaattcaatcttattcccaaccacagattttgactcatgttttcctttaaattactggttgtttttttgttcttttgagacggagtcttgctctgtcgcccaggctggagtgcagtggtgggatctctgctcattgcaacctccgcctcccaggttaaagcgattctcctgcctcagcctcccgagtagccaggactacaggcgtgcaccaccatgcccagctaattatttatttatttatttatttttgaggtggagtctccttctgtcacccaggctggagtgcagtggcatgatcttggctcactgcagcctccgcctcctgggttgaggaggctaattttttttttaatttttagtagagacaaggtttcaccatgttggccaggctggtctcaaactcttgacctcaggtgatccgcccacctcggcctcccaaagtgctgggattacaggtgtgagcccccgagccaggccaatttttgtattcttagtagagacggggtttcaacatgttggccaggctggtcctgaactcctaacatcaggtgatccacccacctcagcctcccaaggtgctatgattacaggcgtcagccaccgtgcccagcccaaattactggttttattgaaaagaaaaatattcccctttacacttaaactttctccaactactccgtatctacaaaacaaatgtcctagggtagccaacttggtttgctgggacttttctggtttaaaaactgaaagtctggctggttatggtggctcacgcatgtaatcccagcaatttgggaggccaaggcgggtggatcacaaggtcaggagttcaagaccaacctggccaacatggtgaaaccccgtctctactgaaaatacaaaaattagccaggcatggtggcacgtgcctctagtcccagctactcaggaggctgaagcaggagaattacttgaacccaaggcagaggttgcagtgagccgagattgcgccagtgcactccagcatgggcgacagggcaagactccatctcaagggaaaaaaaaaaaacaaacaaactgaaagttcaacccccaccctaccctcaatggataaactgggacagttggtcaccctggatgtcactgagctgacactaatttctggtcaccctcagaggcctggttgccctgcaaagaagggaatcctcctgcaaagatttgcctgtaaagccacaaagcaggagtgaaaggggaggaacagtgctgttagtacatttacttcacattacaccatcaaaacaaaactggatatattctgcttttagtaaatctggcaagtagtgtctcttcagtctaaaaagcggctggtttgcctctggcattgaaagcgggaaaagacctatcaacacaaatcccagaacctgacatgaatacaggcttgaaagcaagttccctgaagtttccctgaagatggcgggactaagtactttactcctcttggttttagattccatccctatggaaagactcttgtaataacattctcaaatgtttctgttcccttgagtgctgaattgtaactctactcagtatgtcagatgctacaaactcaaggataactattatttaaaacttctatcctcaaaatgataggaaatttttggcacacttttcaaactccctcaggtaagagctgtaggtggaaaagttgactcccactgagcgctgggtggaggctgctgacacctataggatagagtttctctaactgaatggcagaattaacttttaaaaatgcagttggcattttaaaaaaatagaacatacaaatacaccttaaggtaaatgttatttagtaaaacattttggcttttatatatagtagtaccccctatattcgcggtttcacttttcgaggtttcagggaccccacagttaaaattctttggtagagacctacagtttcaccattttgcccagactggtcttgactcctaggctcaagcaatctgccagcctcagcttcccaaagtgctgggattacaggcatgagccaccgtgcccgaccacagttcaaaaatattttgagagaaccacttccacataacttttttaacagtacattgttataattattctattatttattgttgttaatcttactgcacctaatttataaatgaaactttcttacaggtatgtaggtataggaaaaaacatagtatatataaggttttgtactatccgtggtttcaggcatctactggggttcttggaacgtatcccgcatgggcaagaggcaattactgtactgattcacaatcttttatccaaaactgttgggacaagatgtgtttcagaattcttcagtttaagaaaatgtttcaaagttggatgactgctaggctaagtggagttcaagctattgtcaccagtgaatagagaaaagtgcaacactggcaagggaggatccaagggtgttcctgcctttaaaccaacatcttggccctcaggtaacactacaaaaagtaagagaaaatcactgggagtgggagagtcatattaaatgtttttatcagcctccatttcttgttaagcagtataaattgttccttctcctaccatccctttccaagctgcagctaagttagggactgtttccagtccttctggctggaaaccacaaaagtcaagtaaccttcacccctgccaagaccatacattctgatgagatccaagccctggcctggattttttgttacttctgtgtgaaattgcaatccaccagacctgactcatggaaagaatacagatcagctgggctaggaacagaaacctcctcttcccaccagccaatcaagaattattcttcaagtgttggccaggcacagtagctcacagctgtaattgcagcgctttgggaggccaaggttggaggatcactggatcccagttcgagactagcctaggcaatatagtgagactccatacaaaataaaaaaaaacttaactgggcatggtggtgggtgcctgtaatcccaactactcaggaggctgaggcaggaggattacctgagcccaggagttcgatgctgcgattgtgccactgcactccagtctgggcgacagaataagagcctgtctcaataataatttttttaaaaatttatttgactgttaacagcgcttttagaattcgttttctgatttttaccagaaaacccccatggggggaaaaattcttcaaacctgtccttgttaacacaaggtggtatgtaagtaaaataggtagatatatctttcgatgctcagcccagtgactgtgatgtcatagctctggtctggaatattcttagaatctgaatctgcagttgctttgtgcgcagtggctcatgcctgcaatcccagcattttaggaggccaggcgggtggatcatctgaggttaggagttggagaccagcctggccaacatggtgaaaccccatctctactaaaaatacaaaaattaggcaggcatggtggtgggcacccagctactcgggaggctgaggcaggagaatcgcttgaacccgggaggcggaggttgcagtgagcccaaatcatgccactgcattccagtctgggcgacagagcgagattcttgtctcaaaaataaataaataaataaaatttgaggaacaggaaaaaaacaaaaagcaaccaatctattaccttcacaacaggctgtaaagtctgcaaagctagctttatgctaaagtttcaacagggacttggcctctgaaaaagtgggtgttgaaaattagagatgatacagttagattgtgaggacttcttaacgcttgcactcctagttcacaaaccactaggtttcctcatctttctgggactccctaggcaaggactccctgagaatggatagccttgggcagaactgtgaagtcatcacagacagcccctcatttactcctttctctccccagaagttcctaccctagtcagacctccggggttcttatcttccgatccatccggaaagaggtttaaagtaggaaatctcaattatcactttaaaagtgctatagaagaatggctgggagaggtggtgtgcctatagtcacagctgctttggagactgaagcaggagaactgcttgagcccaggagtttgagtccatcctgggcagtacagcaagaccccatctctaaaaaaaaaattctaggtgctgtagaagagagtgaagattaaaccaaaggaatgaatctctgagtggcagaacttcagggactttgatgagtgtgggaggtctctgagtgagagggtcttcccagtgcctggaagctcagtctttgatggcagccttctctaatacaccccataagagctgagctgctcttctaaacttgtcaaggtgggtctttccaccaatgcagtttgtttacctttaggtaaatggtacaaaaatcatcatgtaattgttggctgggtgtgatggctcacgcctgtaatgccagcactttgggaggctgaggcgggcagatcacctgaggtcaggagttcaagaccagcctggccaacatggtgaaaccccgtctctactaaaaatacaaaaattagccaggcatggtgatgcacatcggtaatcccagctacttggaaggctgcggcataagaatcacttgaacccaggaggtggaggttgcagtgagccgagatcccgccagtgcactccagcctgggtgacagagagagactccatctcaaaacaaaacaaaacctattacataacacacttcaatgatctgtgactagtatagcttaaataaagccaagtgaaataaactataaaactatacccctatggaatcttttgattcagaggcaggtacatacaaaaatcaaaactggccagatattaaatattacattgagcaaaggtaaagtgctttaactaatagacatgtacaataaaaatttcagattcctgagtagaaaactttcaacttcagtcttcagtaagtggtagccttaatgcctgcccgtgtgtgtgtgtgtgcactctcttgtggaaaaaaatgtgtttcaggatttttcctcctttggtgttcatgtggtgaacaacaaagtaagattgattttttgttgttgttttttgtttgtttgtttttgagacagagtcttgctctgtcacccaggctggagtgcaacggcacgatctctgctcactgcagtctccgcctcccaggctcaagggattctcccccctcagcctcctgagtagctgggattacaggcacccaccaccatgcccagctaaattttgtatttttgtagagacggtgtttcatcatgttggccaggatggccttgaactcctgacctcacgtgattcccctgcctgtgcctcccaaaatgctgggattacaggtgtgagccactacgcccagccttgatttttttttttttttttttttttttttagacagggacttgctctgtcggacaggctagagtgcagtggtgcaatcttggctcgctgcagcctccgcctcctgggttcaaggggttctcctgccctcagcctctcgaatagctgggattgcaggcacgtgccacacgcccggctaatttttgtatttttagtagggacagggtttcaccatgttggccaggctggtctcgaactcctgacctaggcctcccaaagtgctgggattacaggcatgagccacgacacccggcctgattgatttttgaaacaccttgttgcccacgctggagtgcagtgtcatcatcacggctcactacagcctcgaccacctgtgcttaagtgaccctcccatctcagcctcccatgtaggtgaccacaggcgtgtgtcaccacgcccagctaatttttttttttttttttgatatggagcctgtcacccaggctggagtgcagtggcgcgatctcagctcactgcaacctccctctcctgggttcaagtgattctccttcctcagcctcccgcgagtagctgggactacaggctcgtgcaaccatgctcagctaattttttgtatttttagtagagacggggtttcaccgtgttagtcaggacggtcttgatctcctgacctcgtgatccgcccacctcggcctcccaaaatgctgggattacaagcttgagccaccgcgcccggcctaatatttttatcatatatagaaagggggtttctccatgttgctccagggtggtcttaaacctcctgggctaaagagatcctccttttgggaacctaggcttcccagagtgctgggattacaggcatgagctaccgtaccccaccaagattgttttgagacagggtcttgctctctctgggtggagcgcagtggtgatcatagctcactgttgcctcaaatcctcggcttcagcgatcctcctgcctcagcctcccgagtagctgggactaaaggcctttgccaccattcctggcttatttatttatttagagatggggtctaattatgttgccctggctggcctcgaactcctggccccaagcctcatgcaatcctcccacctcggcctcccaaagtgcagggactacaggcgtaaaccaccatgctcggcctaagttttgttgttgttgttttaagcaaaaatctgtggaggaggaaacatctcccagtttgctctcatctgagtctgcttcttacatgagatgggtctaaagacattttagggtaaaagaagaacggtaggatgttttaaatgtacgaatacataaaaatggaagtctttgaaaaggaagacaacagaaacgttaacaacgaagggagtgagcagaatgaagaatggcataaaagagcaaaaccccttctgaacagctggaatatgacaccagagtactaaagactggtaatgccatcaggatatgaatgataacgcacacctcgtaaagaattttttatgctggctgtgaaatttgaactgatagagtggggtggctgtggcagggaaagctggtgagacaattatgctaatggcagggccagacgactgggtgagtgcttaaatggtgtcgtaagtctttataaaccttggcacatacgtttgagtactggtcatctactgtaagcttgggacaattctactggtatttccttacatttattacccagtccctcccctgtcccccaacacctgaaactttaaaaacaatctttccaaactagctttgaagagctgtacttttccttcgtatgtacgttgtttaagtacgctgatagcaacgcaatatgacaattcaaagggaatcccgtcttctaatctcagggttttcattctggggaactctccctgcatgtgaggattagggagcccggaaagcccgtttcaacttttcagttctgagtcccgagtcactactctgccctgtaccgtctggagacttaatgggagcgagtgcgaggcagtgaattctccgctctctagttttccaattctacggtcttcaaaaaaaggtttgctcttgagctgcgcctaaactgagaagcgggaaaggctagccccgctaaaggcggacgagtggcagaagcggaaacccagttaagagaagggactgccctggagagcacagaaagcgaaggttagcgggggaaagcggcgcccctccgaggaaaccgacaccgccccgccacgccaaggcaatgggcgccaccacgcagcgccgggaacgcgcgccgacgccccgcgctccgccggcgtccgcccgtccccgcgcgccccctcgcaccccacgcgcgggaggcggggccggcgggggcgcgcgcggggccgcgggtaggggggcggggcggcagagctcggcggctgggactggaggacagcggtggcggaggcgactagcggcggcgggagcggcgccgagaggccgtgcgggacgcgggcgccaggaccggccgaacgcagaggtaacgcaggaccgaacaggcggccggggagtgggcgcgggctcgctgggccccgaaggcgagtggcggaggccgctcgcccggggcgccgacgccgctcccagagaggagggggcggggcgcccgggtccccggaggtggcgccttttgtctgccttacccggccgctccgccccgctcccttcctctctcctgcgacctagccccctgcccttttggtggactcctcctcaggggccctccggcgcgcgcgctcccgcccttgttttgtttggatttgggggaggagggggagctcttctctggccgtgcgaccctgcgtcccagcgcgcctgcgtcggcgtcctctgcccgccccgattggctgagggctgcgcatgctccgaggcccgccgcggtccggcgtccgcccgcgccctcccctcaccccactccctcagcggttttcggagccggttcgaaagatgccggcggcggtgactggctgcggcgggcccgccccccgggttctccgcccccgccgccgccattacggagctcccagtggtgagtgtgcggagcgccgaggctcgcgttccgccgctgcttccgtcgccggggcgggcgccgcggtgtccctgccgagcgtgagccccgaactgtcaccgcgccgagccccagcctcatccgtcggtgtccgcggtccgagctttccccgcctcgctggcggcccgcgc
